United States Patent Application Publication US 2020/0354739 A1 - sequence listing, part 3

SEQ ID NO: 22 - DNA, 3122 bp, Glycine tomentella
taaatttcttttggattatgtttatattcgagtacatgctattgctaattgttaaacagagttatttatatgccttagccttggctgtaaacatcttcgttttcacttaatgtttgatttagcaaaatagaaacaaatattctttagataataatcgttttgcaatatcattacatgtcttggtctttttttataaaaaaaaaattactaaaagaatatcgtaagaatcaatactgtctctgactctctgtgattctgttactctatgttttagatgaaaggaattttcatgaggaatataactagttacttgtaattacttaaacactatattcaactctcgcttaattttcatttattagttagcttttcagttggtccggttctcataccttacacgaggccaatcaagttgtggatttgctagcaaattaatgaaattatgtcaatactatggagggtcacatgttaatattttagcctatgctatttccatgatctttcctggtggcttttagtgttttttccttggggttttagccccctttcattcaaaaaaaaaggttaactttttcagttgataatggcaatagaccctgggtaaaattcgttattaactgactgataaattaaaatataaaaagatgtatttttatacagatcaatttattgaaaaacaaaattataatttttatttaaacacattaaataataaaataaattcatcttttttaaatatatttattttaatcatatagttcacgtatataatcaaatgtatttgatgaagtctctttagtttgactggtaaacaaaatcttcattttgaatcttgtaaagatgtgattagttaaaatttttttatgaagattagttataaataaaattaatagatatttcgtattaataatatgataaaaattatatttaattaaaatgtaaaagtaattgtatacatattttttaatttaatataatcaatactatttgcctttaaaaaatcatcaataggcaatagcatttatctttactttttttcctatattagtattataaggatggtatcgagccgacaccacacaccgaagtgataaacgcgttgacttgaatccattgtgaaacaaacagagcaagcgataatcaaacacttgatcgatcattttgcaaaatgaggatgaagaagatctgtcggctacggttgctcgcactcgcagaggcacacagtcatagtcataaatctttctcaactattgcttctgattcctcactcatccttgaaatggatctcaattctgaccactcttaagtcttatgtagtttgattctgtatatcactttcaactaattaaggaataattaatttattgtcttctatttttgttttcatctttctctaaaatacaacaatttccaaatatataacttataacataaaagttttatgattgttgtctttttattttgtcttgctaatttccaaaaatgattttattttactccttcctaattaataaaactcgtattttcaacaaattatatttgtatatttaattttttctcttttaattttttttataaaatatggtatacctaataatactaaataatccgtatctatctaaatctattacatttttaattatacacattctgactaacatatatatggaataattagtttattagataattttactaaatatttcgtattcaatagctttgaaactatatctgacaaaaataattctaagttaacgcaatacttaaaagtgattttttaaactaaaacttgaaagtaattaaggtagaacaaacttataaattaaataagttcttaattatttgaaatgacttatcaaacagatatattatatttggtaaaaaaaaatggcttaaagatgacaaattatttgaaatcaaagttgttaaagtagatcatttaattagaaacgttagataaaagtatttattgaattaactaataataaatgtaaaatgatatgaagaatatatttataaatattctttttaattttgtagtcaaaagtatattttttaaaaatgtagatgttatagattaaacagacctagaataatcaaatgtatcttaatcagtagtatttattttggttggtgcctgtcctccactagtattgaacaaggacaccagagactcaatttggagctgctcatgcgttgacttacccatcattttgcaaaatctgtgcacaagagctgctggcagaggtagatatgcatgaatctttcttagctgttgcttctgattcctcactcacccttgagatggatctcaattcttaacagttagcagcagaggtacacatgaatctttcttacttaactcttgctcctgattccccctcacatacattccaatcattttgtatatcagtttcaatagggacggattgagaaacaagaaaaagaaaatattgttaataaaaaatgaataaaaaaatcgagtattgagttcatgtttgtctgatttttttttctagaagtagattttatttctagttttacgcataaaattaataataaatacttctgtgaaacttttttatttattacataattatttattagaattaaataattaaataattgtgtaagaaaaaaaaatcgtcccccccccccccccccccgatccctatgcattcctggatccgtccgagtttcaataagttactacttttaaatggtgctacttctagtctcaaggtttatatatacctatacacccacacatatacaattctttttgtgttttgtgtttcgtaatcattgctttagaatttaagattttattgtaattgcctatatttaaaatgtttttactgtcaaacagaaaagataaataatgatcaagtgtgttactaaaaggttgaatcattagtttttacatactgaagttttggctttgggtgttacatacatattcatattgaataaagcgcctatgtttgtgtatgcttcaaaattcttcaaaattctataccgctgatgtctagaatttctatacgttgatttggtgtattatatgaatataaccttttattttattttcttatttaacgtattgtaggctttgaagtttcata

SEQ ID NO: 23 - DNA, 1000 bp, Glycine tomentella
ttatatatcctctaaagatctgcttcgcagttgacaggctaggtgggtctctatgagacaaatgcgaaaaaaaaaaaaaaaacttacaagatactaaagtaactttcataactctacaaatgggatgtttgactaatggatgtttgactaatctaagatgcctttgaatcccgtttattttttcatttttttgtatatgaacgtttttaatataaaataaacaaatttaaatatatacaagataaataaataaataataatttaaatatatatatatataattacaaaatgtttacctactttaaaattatgctaatttaaatatataacatagttaaattcaattttttttttatatatacagaatatttcttgtggacatttagttccaatatttatagcatatactcataaataatgttaggagtgattctaccaaaataaaattgtaagtgattcacatttaggtaattaatatgaagtaagaaacaaaaaacatcatcaaacatttatttttcattttttggctatggacgttttaatataaaaataaataaattaaaatatatgaaacataacttaaaaaatatatagaattacaaatgtttacctaccttgaaatatgctactttaattatataataataaaattaaattcagttttttatatataaaaaatgagaagaaaaaatattacacgaatttattttcttcaaaaatattttatttcattagacttataagttattaacaaaagaaaaatatactatagaatatttctcgtgaacataacatttatatcatataatcataataaattaataatattgtgcgtgattctacgtacgtaccaaaatttgtgagtgattcacattcagataattataataattaatatgaaacaagaaaaaaattatcaaacatttattttattttttctccatggacattttaatataaaaataaaaatatatacaacataaacaaataataacttaaa

SEQ ID NO: 24 - DNA, 2979 bp, Glycine tomentella; identical to SEQ ID NO: 21

SEQ ID NO: 25 - DNA, 1958 bp, Glycine max; identical to SEQ ID NO: 16

SEQ ID NO: 26 - DNA, 354 bp, Arabidopsis thaliana; identical to SEQ ID NO: 17

SEQ ID NO: 27 - DNA, 2976 bp, Glycine tomentella; identical to SEQ ID NO: 15

SEQ ID NO: 28 - DNA, 1949 bp, Glycine max
gtgattgcggttacatcatgtacggaaaaataattctaatccttgatttaaatttgatcttgactatttatttattctttatttcattttgtaaatcattttatgtatcccctggcaaggcaattttatccaccttgcacccaacacttcgggttcccataaatcaaaccaccttaacttcacacaatgctgtaactcacaccgcccagcatctccaatgtgaaagaagctaaaatttaataaacaatcatacgaagcagtgacaaaataccagatggtattaatgctttgataaaattaattggaaagtataaaatggtaggaaataattaattataattaatttaaataagattaaaaataatttaaaactaaaatgttaaaattttaagaaaattattttaaataatatttaaaaacatttaaaatcattttaaaaaatttatttataggacaattaaatgaatatttcagctaattaaaaacaaaagcttacctagccttagaagacaacttgtccaacaattagatgatacccattgcccttacgttttctttaacatcaattattgtttttgtcaacaagctatcttttagttttattttattggtaaaaaatattgtcgccttcaagttgcatcatttaacacatctcgtcattagaaaaataaaactcttccctaaacgattagtagaaaaaatcattcgataataaataagcaagcaaaattaggaaaaaataacttcattttaaaaaaatcattaaggctatattttttaaatgactaattttatatagactgtaactaaaagtatacaatttattatgctatgtatcttaaagaattacttataaaaatctacggaagaatatcttacaaagtgaaaaacaaatgagaaagaatttagtgggatgattatgattttatttgaaaattgaaaaaataattattaaagactttagtggagtaagaaagctttcctattagtcttttcttatccataaaaaaaaaaaaaaaaatctagcgtgacagcttttccatagattttaataatgtaaaatactggtagcagccgaccgttcaggtaatggacactgtggtcctaacttgcaacgggtgcgggcccaatttaataacgccgtggtaacggataaagccaagcgtgaaggggtgaaggtacatctctgactccgtcaagattacgaaaccgtcaactacgaaggactccccgaaatatcatctgtgtcataaacaccaagtcacaccatacatgggcacgcgtcacaatatgattggagaacggttccaccgcatatgctataaattgcccccacacccctcgaccctaatcgcacttgaattgcaatcaaattagttcattctctttgcgcagttccctacctccccctttcaaggtccgtagattcctcctgtttttttttcttcttctttattgtttgttctacatcagcatgatgttgatttgattgtgttttctatcgtttcatcgattataaattttcataatcagaagattcagcttttattaatgcaagaacgtccttaattgatgattttataaccgtaaattaggtctaattagagtttttttcataaagattttcagatccgtttacaacaagccttaattgttgattctgtagtcgtagattaaggtttttttcatgaactacttcagatccgttaaacaacagccttatttgttgatacttcagtcgtttttcaagaaattgttcagatccgttgataaaagccttattcgttgattctgtatggtatttcaagagatattgctcaggtcctttagcaactaccttatttgttgattctgtggccatagattaggattttttttcacgaaattgcttcttgaaattacgtgatggattttgattctgatttatcttgtgattgttgactctacag

SEQ ID NO: 29 - DNA, 354 bp, Arabidopsis thaliana; identical to SEQ ID NO: 17

SEQ ID NO: 30 - DNA, 13473 bp, Glycine tomentella
atggcttctatctccagcgtccagagcagctcttctgcgtatgacgtgtttctcagcttccacggtgatgacacacgcaacaactacaccaacttcacaggttttctttttcaagctctcagaagaaaaggcatcgtcgccttcaaaggtcatacacttctcgaaaagggtgaacccgagctgttacatgcaattcaaggctcccgccttttcattgtggtcctttcaaagaactatgcttcctcaacttggtgtttgcgtgaactagcacacatcttcaattgcattgaaacttcgccaagacgtcttctgcctattttttatgatgttgatccatcagatgtgcgaaaacagactggatggtacgagaaagccttttcgaaacacgaagaaagattcttggtagataaagagaggattgaggaaatgctgacatggagaaaagctctgactcgagtggccaatctctctggttggtatatcccaattaagtaagtaacccgctctcatctcatgaaagatgtaacttgcaaattgggtccaaatttattataaatgtttgacgtttgatgcaaatggtatttaaacgttgaaaactactcttctattatcttctcctgttttgcttctcttgggtgatgatttcgcattcttcattttctttaaaatttcaggccacaatatacagagattgaagaatttgttcaatatataataactctattgggtcctaaattttcaactcttcaaaatgaagcagagggaacatcttcagataaagatgaagttttatacaatgatgagctgtcagatttgatgaggataagagattttatcagcctcgtgttgacttatcccgtgaaattagaagatgaatatattttaagatcttggattagtgcatttcctgaatggaaagctcagttattgtccactggtgatgatactgtgatggacaaaccatggtgtgtactaactgagaaggcactgggatctatgaagggatttatgccaatggaaataataagtaaagtagaaagtggtgagagatccatcatcagccataatgatgttgatgcaataccagaagccattctccaacaatctgttgatctcgcagttaaccaactacttcaaactttgttttctggggattactgtgcacgctatatcagactgttaaccagaaacttggctgaaaaaggatctgtagtggacacaatagcttcagccgttgaagataagcacaccatgtttggaattgacaaagattttcttagagccctatggatcaatgcctcaacatatgagactgatgcagaggttcgagttcaggaagaaatcgatgtcaatatgatgatggaagttgatgacatgggaagcaatgggcagttggtaattgtagtggatgcagatagcaacaacaagctggacctccaaaagttgcgttttccaactggaattgtggtgttgataacaactgagccgtcaacacaagcagagaaggatgttgactttagaattgcatgcacaatggatttgaatatttggacccaggatcatctattgccttggaaagtcttctgcagctatgtggcagttgtatcagcagtagcatggtacgttcatcaatggccattcagaaaattgcagtggaaatagttaaggaatgccacggtcatcttcttgccattgtccttgtggcaaagtatcttacgtatgtgcaagattttaaacagtgggaacttgcacttgacaaattaagcagtctgaatccttcctatgattatcaagatagtgatcgaattggcattagtagagtcatggtcaatgcattcgtaaatattatttgggaagacattggtgatgcacaaaagctttgccttgaactcagtttgcctgttcacaacattaaaaatggcgtgagagatgatatcttggtgtctgattgggctaagacaatattaggatacacacaagaacttggtgaatacagaaggcaattacaacattacatcaatgagcttcaagaccgttttgtcttgttgaaatatgaaagtggagatgtctatttgccagtagaaacctatgatataatacaatcattgcacacctcaaagccttccatcctaaggcatggtgcattaggattgacagagccaccctacattggacgatggcatagtcttattcagatagaattgatggacaataaaatatgtgaattaccacaatcaccagattgccctaaactcaaagtgttgttgttgcagggcaatgttgatttgatggatatccctgactcatttttcaaccacatgcccctacttcaacacttggacttatcctacactagtataagggatttacccccttctgtctctaaattaatacaacttcagaaattttatcttagaggctgtgatctcttcatggaactaccacatcagattggacagctaaagaatctcaaagagcttgatcttgatgggactttgatcacccatctgccaatagagatccgagaattgatcaaccttcaaagcttaagcctctgctttgatggaacttccaagtcaacaattattcctccaggattgatatcaaatcttactcaattgaagtatttaagcatcaacgttgaccctgaagatgagcgatggaatgtgaatgttattagtgtcttggcggaaatttgttatggattatgtaatttgcagaggttgagtatatatgtcccagaggctgacttcttgaaagtcataccagcccaaaaatctctcagtttcagattggttgttggtcaacatatgcgacgtttgatatcgcgtgtaccacctgaactggagacaaaatttaaacactgtgactatagcataaagtttgttaatggtgtgaatgttccaaatggagtgaaaatgcatcttgggcgctccaaagccttgtacctagaccgacatatgaccatcaagagtctctctgatttcgatttgaggaatttatgggagttggaagtatgcatattggcagagtgtaatgaaatggaaacaattgtcagtggaagcaattcacctgataggccagcttctctaatgttgaagtttttgagtgtattctatatgaagaatttaagaagcgtctgcgaagggagtagtcccttctttctctgcttaaagtctatagcattacacacttgccccatgttaactaccatattcaccttagattctgttaaaaacctttcctttctggaggagattattgttgaagactgtccaaaagtaaccaccctgataagtcatgccacaccagaacaatatccagtgtttttcctccccaagttgagaatgatatcgcttctctatcttcctgaattggtcaacatttttaatggcatgcatgttggaccttttatagaagaaatgatattttattattgcccaaaactccaaagtctttccaaatcagagttgtcaagcaaatctttgaagatcatcaaaggagaaagcatctggtgggaagaattgaaatggaatgtagcagagtggggagatgctggtcgacccaattattttgagcgaattttttcaccaattaacgaggaggctgacatgatgaaccagctagctgcacttcaagagactcaactaaatgaatatcacaatacgacgtatcaggtaatttttagttatcctcttttcaaatttcatggtgttattggcatgttggtattttcaaatttttgctaatttttgtataactcgttatgttctttttctattaatttcactatcatctttcatttcttttacttcattactattactatgctttttttgttctcagattgatagtgactctgagcataaaatgtgactatttatcatgaatttctttaattttggattttttttctttcttgattttaatatatatgtagtataaactatttagcttgcattataatattttaaaaaatgcccatcctgcttcctgctatagtgttttaagctatgtacttctatgtgagattaataactatgattagttttcatgtgtaggatatcttcctatttttgtatatctctttcttaatgaacatatttttatgtcaaacaaaattaacttcacaacaattcttcttggtgctttaaaaattgtggcaaattttttttcctgcactttatgatcatacttaattatgtttggagatttaaataaacaagtctattcatatttatctccctactcatcaaactccaaccatgggtcatactgagctagtgttataattataataattttgtatctctgtatgaattgcttttgctaatatgatcataccctcttagcttcatttttcgtactgtattacttgaatgttttcctttcagggaatttcaagttctacacattcgatagcaaagtcatctttggaaatacctgttttgtcacctttagccccagtttcatctgtgggtaggtttagttcaaacagtgaagcccaaaagcggaaagtcgttactgaaccaaaaatattacaagatgcatcaaaaaaggtaataaagcaggtttgagatgccttgtcacctttcgtgattgattgcttttggttttcttatatgcacgagttggtttacttacattagaggcatgtttgataaacctgtaaaattatacgtcgaatgtgttttgcttgaaaagattataattttaattgctgaaaaactcatttaattaagaaaacttaaaacatttagatgctaaacacggtgacaccaaaggaaattattgtcatttaattattcagataggatgtagttgctgctttattcattcagtatcagcaatgtgctgaatgtattcaacatatttcacgtaaagaattattttcagttttcatatgactagttgccaatagcaacaaatagtggtgctagcgcagaattgcattgcagagcggctagagcatgctatgaaaattgaaaagtgtatcagtttgaagtagcgaccatcacagctgccgtatctagcaaaattgctgaaattgctcctggagcaggctttattggagtgggtcacaaaaaaacctattttaatttaaccattaaacaactttatttagggtgttttagtgggcaatgattttgccctcttctttgaatcacaactgaaactctgctttctcaatcacttgcacacactgtgatgacattgttatccttttcccaccaatacacactcttttctggcaacatttttggcatttccctgcattttcgggccttctgtgagttttttgccatccccaacctctgcagcctctattctccatagtttccggtctttcctgacctttatggccattttctggagaacctgtcactgtttctggccaaccgcgacctttgctgccgtgctctgttcactgttctgtccttggattgttcatctctctaatacagatccttcatctctctgttttgtgctctcttctataatttactttaacatttaatttaatatttgtcaaatttttatttttatttttatcaattacgaaatcattgatcaaagttttataagaaagtataaagtatttctagcattttattgtcaatatataaaatgacaaagtcattcaaattatttcgtaacatagttaatatcaaataagattttagtatgtaacataaaaaagatttgagtaattttagttttaaaaactactttcaataataataagaattaccagttttatgttgttcattttactgaacttccttgtctatgatccttaggtgagaagtacaatctataatcacaataatggaaaatgaatcatattcaccatactagaaataatgcgcaactgagaaaaagatagaagaatgaacactccaattcaccatattcctaacatgatcatgattggaatgagttgaactcaaaagcagcgagtgagcacttcaaagcattagcatatgacagatatgattggaaatatatgctgtctgacatgatgataagttttttaaattcacttaacacgtgaagtatcactattttatacgtactgacactgactgacacaccaaatgtggagaaatattgaagggttttttttggttagttaaaagcaagtcctaaatcatgcaaaattatcatttaatgaaaaaatatatgtaggaagatatcattgcatcgttccttaaaaatggagcaagaggatggccaacccttaaatccctgtccagtttcccagcaagtgcttgcagcagtgtagtttttcctgatcttggaggccccaaaagcaaggtcaatctgaacagtgtttttgaaagataaatagatagggaaaggaaaaaacaaaagttagcaacatacctaaaataatacattaatgcatttttgaaaaatataactcgttatgttctttttctattaattttactatcatccttcatttcttttacttcattactattactatgctttttttgttctcagattgatagtgactctgtgcataaaatgtgactatttatcatgaatttctttaattttggattttttctttcttgattttaatatatatgtagtataaactatttagcttgcattataatattttaaaaaatgaccatcctgcttcctgctatagtgttttaagctatgtacttctatgtgagattaataactatgattagttttcatgtgtaggatatcttcctatttttgtatatctttttcttaatgaacatatttttatgtcaaaacaaaattaacttcacaacaattcttcttggtgctttaaaaattgtgacaaatcttttttcctgcactttatgatcatacttaattatgtttggagatttaaataaacaagtctgttcatatttatctccctactcatcaaactccaaccatgggtcatactgagctagtgttataattataataattttgtatctctatatgaattgcttttgctaatatgatcataccctcttagcttcatttttcgtactgtattacttgaatgttttcctttcagggaatttcaagttctacacagtcgatagcaaagtcatctttggaaatacctgttttgtcacctttagccccagtttcatctgtgggtaggggtagttcaaacagtgaagcccaaaagcggaaagtcgttactgagccaaaaatattacaagatgcatcaaaaaaggtaatagagcaggtttgagatgccttgtcaccgttcgtgattgattgcttttggttttcttatatgcacgagttggtttacttacattagaggcatgtttgataaacctgtaaaattatacgtcgaatgtgttttgcttgaaaagattataattttaagtgctgaaaaactcatttaattaagaaaacttaaaacatttagatgctaaacacggtgacaccaaaggaaattattgtcatttaattattcagataggatgtagttgctgctttattcattcagtatcagcaatgtgctgaatgtattcaacatatttcacgtaaagaattattttcagttttcatatgactagttgccaatagcaacaaatagtggtgctagcgcagaattgcattgcagagcggctagagcatgctatgaaaattgaaaagtgtatcagtttgaagtagcgaccatcacagctgccatatctagcaaaatagctgaaattgctcctggagcaggctttattggagtggatcacaaaaaaacctattttaatttaaccattaaatttagggtgttttagtgggcaatgattttgcccccttctttgaatcacaactgaaactctgctttctcaatcacttgtacacactgttatgacattgttatccttttcccaccaatacacaccttttctggcaacatttttggcatttccctgcattttcgggccttctgtgagttttttgccatccccaacctctgcagcctctattctccatagtttccggtcattcctgacctttatggccattttctggcgaacctgtcactgtttctggccaaccgcgacctttgctgccgtgctctgtttactgttctgtccttggattgttcatctctctaatacagatccttcatctctctgttttgtgctctcttctataattttctttaacatttaatttaatatttgtcaaatttttatttattttttatcaattacgaaatcattgatcaaagttttataagtaagtataaagtatttctagcattttattgtcaatatataaaatgacaaagtcattcaaattatttcgtaacatagttaatatcaaataagattttagtatgtaacataaaaagatttgagtaattttagttttaaaaactactttcaataataataagaattactagtttattaataatattagaaataatgcatgtatttgaaagaaaaatacaatatttttagtgaaatatgaatttctttttctatacttcttgcaatatctttattttaaaaataaatcaagattttcaatattataatttgcttactcttctgtatttttctttaatatttgtcatactttattttatttttttatcaattacgaaattattgatcaaagttttatagaaagtgtaaagtatttctagcattttattgtcaatatataaaatgacaaaatcattcaaattatttcaatatcaaataagattttagtatatcaaataagatttttagtatgttaaaaaagatttgagtatttttagtttaaaaaactacttttaataataataataatatttacaagtattattaataatattagaaacaatgcatgtatttgaaagaaaaatacaattttttaaataaataatgtttttagtgaaatatgaattttttttgtctatccttgttgcaataaataaatcaagattttcaatattataattcttagtagaacttaaaagtattttcaatccatatcttcatctaaagttttcaattgttcaattaatacaatcttaaaattacagtcttaataataaaaatagtaatatatgtcattataaaatttatcacctaataattcaaattaataataaatatttttcaaaaagtataaattttttaaggctaaacgtaactacttaactggccatggccttttggttgccacagccctagttagaagtgaatcttagaggggtctgaaagtgctaacagacggattctctccatttttagtggaatttgcttactctttatcagcaacttaagttattcattgctgtcacgaaaaaaagaaaagaaaaggaaaacatcactttggaaatgtctcattccaatgaagctatgatgcatggtcatataagtagggagttatacgcctgcaacttgaaattgtttgttctctaattttactatgcatcaattataccacaaaagattcagaaggtagatattctctatattgcaaatcgatctttagcttcaacacaatgtaagctacttccccaactgaaaaatgatgatgatggttttattcatgaatcgagatcaaatactgttgctgagttccaatgtgaagatgtgtccgtaggcggtgtctctatagtctttagttaaacaaaaataaatttcacgaacctaacatgttgaataaaagactattgtggtttttatattttggcatggcaattaacaggttcgtaaactaagaacagttcaaactgaagtttggagagaaaagataagtgtcaatgcggaaggttgttttgatgatggacgtagctggagaaaatatgggcaaaagatatccttggagctaagtttccaaggttagttaaaagctatttttcatttaactttttcttgttataaattaatcaagtttaattagcaaattttttcgtagtataagttcatataaatggcatttgatttgaatgggacagaaaggttcacccctctaggttattgacatacaaggttcacccctctcgtttagttaataccagaggccttaggcctggtaactggaaaatcagtaaccaattagctaatgaatggggaaaataaaatatgcatgtataatgagttctctttccttgttttaatggttctatgcccccagtttttcaaaatgacctgcaatttgaaaaattatctaaaggaccatgtcagctggtttcaaatgggcccaaattagtgcttctgttggaaacttgttattgacattctcgacaaaaacttgttcatttgacaactacctttacaaaatttaaaaccgagaacaaccacaaactccagataacatctcattctttatttttggacatagactatagtataacattcacagcaactaaaagagaatgtaggtttcttctccaacttccttatcaaggcttaaaacaagagggatttctattaatatttttatttgatgttcgtaccatactaactttgccagtctaatgtttatattaagaacataaaaaagttgttttctagttttgccgaaaaattgacaactagtggtttgcattgcagagaatattacaaatgcacatatagaatgacaaggtgccgagcaacaaaacaagttcaaaggttagacgacccaacaacatttgagataacctaccgaggaagacatacatgcaccaaagaacagaatttgatcattgagattgggatgaggcaagtttgaataaaaaaacttgtcttgcaaatttgcattactaaaataaaaataatatttaaaatatattgttgatgttgaaccctagccgggaatcgaatccggagcccaatccagagccgaaccacccaaaatataatatttaaaaaaaatgaccatcgtgcttgcattatatattattattttaaaatatattatattattttaaaaaaataatatttatcatgaatttctttaattttggatttttttctttcttatttttaatatatatgtagtataaactatttagcttgcattataatatttaaaaaatgaccatcgtgcttcctgctatagtgtttaaagctatgtacttctatgtgagattaataactatgataagttttcatgtgtaggatatcttcctatttttgtatatctctttcttaatgacatctttttatgtcaaaacaaaattaacttcacaacaattcttcttggtgctttaaaaattgtggcaattttttttcctgcactttatgatcatacttaattttggagatttaaataaacaagtctgttcatatttatctccctactcatcaaactccaaccatgggtcatatgagctagtgttataattatataattttgtatctctgtatgaattgcttttgctatatgatcataccctcttagcttcatttttcgtatgtattacttgaatgttttcctttcagggaatttcaagttctacacatgatcatctttgaaatactgttgtcacctttagcccagttcatctgtggtagtagttcaaacagtgaaacatgaagccaaagcgaaagtcgttactagccaaaaatattacaaatgcatcaaaaagtaatagacaggttgagatgctttcacgttcgtgattgattgcttttgttttcttatatcacagttttacttacattagagcatgtttgataaacctgtaaattatacgtcgaatgtgtttgctgaaaagatataataagtgctgaaaaactcattaattaaaaacttaaaacatttagatgctaaacacggtacacaaagaaattatttcatttaatattcaataggaatttcaagttctacagaataccttagtctacttttattgtatattaaaaaatatcttaagagatattttttgaaatcttatataacttctaatggattgcacgtgaatttcacttttaaatatttaaatatatttttagtttttttttccattttttccttcactattcacttttttctctcctccctctctcctcttttcacttcttcaacttccaaaactatcttttcttcttttttcctcctccctctctcctctgttattccactttttcttcttcctcttcttccttctttgttgcggctccaccttctccttctcctccgcgtgcgcaacccccacctcccttttcctccacacacgcgagcccccttcacctgatatgtttttttttccaatgcgttgtttgtttttcttcttcttcatttatatttgttgtgtttttacttcattccaacgaatctgttacctctgcgttttattgttaatgttgttgatgaataattttttatttggaatctgtgcagatatacacattttttcctgaagaactggattttcaacatggagatcaagatctccatgttctcgattttgaagatgttatatttttttgatagttttttattgctgaatttgggaaatgttagatcttcagcttaagatctatctccaagcttgatctccatttctcgattttgagattttatattttttgatagttttttattgctgaatttggaaatgttagatcttaatctatctccaagatctaatattaaagatattttaagcgttaatgtgaagggtgtttagatgatggatataattggataaaatatgggcaaaagagattcttggagctaagttttcaaggttagttaaaacctctattctcatttaactttttattgttataaattaaacaagtttaattagcaatttttttcgtagtataagtttatataattgcatttgattagaatgtgacagaaaggttcaccccctctaggttattgacgtacaagtttcacccctctcgtttagttaataccagaggccttaggcctggtaactggaaaatcagtagccaattagctaatgagcgtaatggggaaaataaaatatgcatgtacaatgagttctctttccttgttttaatggttctatgcccccagtgttttcaaaatgacttgcaatttgaaaaattaactaaaggaccatgtcagctggtttcaaatgggcccaaattagtgctttctgttggaaacttgttattgacattctcgacaaaaacttgttcatttgacaactacctttacgaaaatttaaaaccgagaacaaccacaaactccagataacatctcattcttttttttggacataactatactataacattcacagcaactaaaaagagaatgtaggtttcttctccaacttccttatcaaggcttaaaacaagaggggtttctattaatatttttatttgatgttcgtaccatactaagttgccagcctaatctttatattaagaacataaaaagaagttattttctagttttgccgaaaaattgacaaaactagtcgtttgcattgcagaggatattacaaatgcgcatatggatctgtacaagggtgcctagcaaaaaaacaagttcaaaggttag

SEQ ID NO: 31 - DNA, 3609 bp, Glycine tomentella
gagaccagtgtgagtatttgggatttaatgtttgtcctgcctcttcttcttgtcaaacaatttgcatgcgggcgtgcatgttttctaactcatcaaatcatgtaatatgagagtgagagtgagatcaagcttgagaattaatgaaagaaagcatgatgaggtgtgaacgagtttagaaggataatcgaagataggaaagaaggctaaataaggataaatccactatggccatcataccaaaaagaaggtgtcaaaataacactactacaaaagcagtcttctacgacatcagttttacgacggtttcacaaaacctgatgtcgtagaagacgtggtggcatttttgtaagtaattgcaaatttttaaagataggtcaataaaaatcgtctttgaaaactcattacgacattggtttatttaaaaaccaatgtagattaagagaatacaaagttgcttttacgaaatcgtctttgaatcagttgttcctccttctcgtgattcttgaacattctcttcttattcccaactccacgggcgcgattccatattctcaccactcacgtccttcttcttcttctcttcttcctccattagggttttctcacattgctggatgtggcttcgctctcacattaacccttgaaaccacaatattcgtcctgctcgatcatatcaagatctataaatagaaaatatagggaaaatatttaaataaacaaaaaaatatttttttttcatggattccattttcaatcgatttgtcaatgcaaatagattactcgtaatctgtgtcgatctcacgaaagtgcatatcgatatcgatatcaatcaatatatacaaaaatccacctctttcatttacaacaaaatggttcgaatccgaaatagaaaaatagaaaaaagaaaagggtttgaaagaaatcgtaaaaatatgtatattgtacaccccttttcctgcttcgctagaccctataacttcctcttctctctcacactccgtctttgaatgtgttgtataaccgatgtagaaagcctataaattatagtagtataatgcatacaatatataatctcatgtactcaagtttgtaatcaatgtgatcataaaacaaataatatttattattataaggaggtgatcaaataagaacgaagagatagaaagaaaagaaaatacctatgatgtataagattaatatttggtttgaatgaaaaaaaaaagatagcaaaatatagataattaacgagaaaaaatagaaagaaggtgtggggggggggggagttaatttttaaacaacaaaaaatcaaatttcttttgacttttcttcatattcaaattttaagttttcttttcttctgtctttctctcattacaaaaacaaattttttgaaggatagaaggagtcaaatacaaaaaaataaaatgaacttaaagaaacaattattaaattttaagagataaatattaagcaaattgttaatatttttttaaaatattaagcaaacacatataaaaaaaaagttagccttttcagttgataattgataatgacaatagatccttggtgaaattcgttattaattgactgataaatcaaaatataaaaagatgtatttgtatacagatcaatttagtgaaaaataaaattataacttttatttaaacacattataaacaaaagatcaattttatttaaacacattaaataataaaataaattcagatttttaaatatatttatgttaatcatatatttcatatatataatgaaacatatttgattaagtctccttgatctaagttataaataagatatatatagattagttatcaacaaaattaatagatattttatattaataagatgataaaaaatcatatttgattgaaaagtaaaagtaattgtacatatattttttaatttaatcataatcaatactattagccttaaaaaaataatcaatagcattatatttaccttttgtcctatattggtatcgagacgaaaccacacattcaagtgataaaagcgttgacttgagtccattgtgaaacaaacagagcaagcaataatcaaacacttgatcgatcattttgcaaaatcagggtgaagaagatctgtcggctacggctgctcgcactcgcagaggtacaaagtcattatcataaatctttcttagctgttgcttctgattcctcactcaccacttgagatggatctcaattcttaacagttagcagcagaggtacacatgaatctttcttacttaactcttgctcctgattccccctcacatacattccaatcattttgtatatcagtttcaatagggacggattcagaaacaagaaaaagaaaatattgttaataaaaaatgaataaaaaaatagagtattgagttaatgtttgtttaattttagtagtagatttgatctttttacacataaaattaataataaatatttttgtgaaacttttttatttattaaattattatttatttgaaataaataattaaataattgtgtaaaaaaaaaaatcgctatgcattcctggatccgtccgagtttcaataagttactacttttaaatggtgctacttctagtctcaaggtttatatatactatatatatatgtgtatatatatatatatatttttttttttttgtgtttcttaatgattgctttagaatttaagattttattgtaattgtctatatttgaattgtttttattgtcaaacagaaaagagaactaatccgaggtgcataaataatgatcaagtgtgttactaaagggttgaatcataagtttttacatactgaagttagagtaataaaagctactagaacgcgctgtaatatgctgtagcatgatttttccgctagcctgtatgcagacgcttcacactgggaatatattattgtaagatctatattttgggggtgagtgggtgagctgtggtaagtcaaaagaaaagaaaaagaaagaaatattgtgccagaattcttttcttaagtaatgataagtatgttagaaagagatttgctttctttagttgtattgatattgatgatgttgatcatatgtaaaaattagaaggctttcgttatataattgatcatttaattattattaaaagttaaattaaattatctaattaataaaaatgttataatcatattatttttacgactaaaataaaaaatatatatattgaatatgaatataattatgtaaaatattttttatgtataatcttttttaaagaaattaatttcggtatcattcggattaataatttcttattaataaattatttgattgaattttttaataattaatggattcagttgaattattaactataattaaaagatgaattatataactaagcgaaattaaaatttcaaaaataagattaaaaatttaaaataaatcaaattgagagtaattgattaaaataattcccgccacaggccacagcttttcttccattggatcccattttacaactaccgcattccgtgcgctccccaactccagcaatcgagaaatacttgtcctttttcacaaacaagtttacttccactttcgcaattcca

SEQ ID NO: 32 - DNA, 2129 bp, Glycine tomentella
acgaaaacccagcaataattgagataacgtaccaaggaagacatacatgcaccaaagaacagaatttgatcattaagagcggggatgaggcaagtttgaacaaaaagactagtgatcaatcttcaagttataaatacatttcatccaaaaaatgttactggtaatccactaaacttggaacatacaaaacatcaagctagtatccaatgaatgttaattaaagattgttacaatgcatgtaatctcttgttgaatcatcgtcatcatcaaaggttgcctacataacaagacaaaaaatacctccattacaaggcaaaaaagtgggggaaattgggttaaatgattttaccatcaaaatgtagtgaaaaaaatgatttttggatgtttgaagagaggggtggggggatcaaaagtattcatgataaattaatataaaattataaaaaccagaaattattaattgacttaaaatatgttttttgtctatacaaaatgctcaaagttcatttttaatctttataaaattttatctgttattcgtcctcgtaaatttatattgtgactttttggcctgcaatccaaacctatgtgaaatttgcttgttccagaaaacttgacagctgtaactttttttttttcgtcacaaaaaaaaaagttgtcttccttgttcacctcaggagctcggtgaacttcttctgaaacttgttcaagggagggtagcccctggtggtggtgatgcgtgtaagaagcaaaggcgtagttagctgtcacagatttgccacgcaccgaaactttcctcgtttttcccagcatctcgatcagtttttggggactttcagttgccaccgcagaggacaatgacgtgattagggaattgaatgtagtgaaaccagatctggaggtttggtcgccgacgtcgacgtcaccgaagaggatgaccctggcattgaacatctctcttcaaagccatccccaccgcttccgctttctcttcattaactcaactcggtgtgcgtgaagaggccgctgtcggaggggataggagcagagaaaatgactctggccaaagtggaaaaaagaaataatttaaaattttcggtcgttcaatttctgttcgtttttggccgtcagaaaacgtaataactaaaaatttgaatccattcttttacttataatttatccttttttatctttttattcttgtacaattgtttttttaatcatttatgtttgttttatttttagtttttaaagtattttaaataatattttgaaccataaaaatattatctaaaatttcaaagataaaaaaaacaaaacaaatataatttgtaggactaaaaaaaattcaaatataaaaatatatttaatataaattaaaataataataaaataaatatcatatcatcacttaatatctaaaataaataaaaataattaaaatcataaacaaaataaaatttaaaaaaccaaatcaagtctcaaaaagtacaaggaataaaaacttataagattatcaaattagggaatacttatttcacaatttatttatttatgggaatatgagtttgcaaaaaatatcgccacatttgttaggaggtaacaagataattatattgcatatattttatttttgggaaactcatatttcatatttgcccattatttattttcaaattaggagattggaaaagtttatttccatttgatacgaagtctaattaatgagtagggatgatagcaacaaatttacatggggtaattttaaaaaaattacaaaattaatagattttgaaaatattatacatatgataagtctattttaaaacacaatttcctataaaaaaagtcatattttaaaacatattttagaacggtataattttttaaaaaaatactaaagttttattttagatatcattttaatatttttaaaaaataaaatattaaaagtagtaatttaaaatacaattttactatttttttttagaaaaatataaaatattgaagtcgtatttgaatcatgacattagtattttttaaataaattataattttaaagttgtgtattaaaatacaatttttagaaaattttattttaaacacgaattattaatattatacaatat

SEQ ID NO: 33 - DNA, 690009 bp, Glycine tomentella
taaataataataacacggacttatgcccccgccaggctaaatatataataacaccacggacttaagcccccgccaggcaaaatagaaaataacacggtcttatgcccccgccaggcaaatataaaataatacggactttagcccccgccaggcatttgcatatgaacatgcataaatgattctcttttcctcttaattttctcttcaatgttacctttctcttgatctcttatgctcaaatttgtcaacaggaatctattacagagtttaatgtatgtagaacaatatataaacttctttacacaaaattccaattatacaaccacagtccacttcatagatttttcagaacaagtcacaattaatcacaactcaaatagtttcaacataataaacataattccatcatacttttttttatataacatttaataagtaaactcaagaatttatagcacaataaacaacacataaactttagtgaaaatattcctttaattatcattcaaatccattacttccttagatattcaagccaattaaacaaattttaatcattcatactaccaatcttttattaaactaaattcaaattatttcttcaattaataattcatcaaaccaaacttagttctttgaggcaattaatcatacacctaatgaacaaagcttaattctaaagcaatttgaataatcctagcatacttaaaccatatttatcataaacttcccataccttgcttgattttagaactttggacagccttctttccttgcttcttcacgtggaattttaggataatggaccttggcttttctttaggtcttttgaaaggaataaggtgagtttggaaaatgatggaatgaaagtaatatggagtatggttttttgcacgttcctttttggcttgaaaggcttggattttcggtcccccatccttcttatatagtgttaatgaagtgctgaatcactctttgcactactacaaaacccactttttacatcggttatataacccctttttacgtcggttctgcaaccgtcgtggatacgggcgtcgttaaaagcgtttcactttttacgtcggttgtcaaccgtcttagaaaagcactttcgaagacggttctttgtgacaaccgtcttagaaaggcattttctaagacggttgctaactacaaccgtcatagtatactacattttaagacggttcgtacccaacaaccgacttagaatgtcatgtagcacgacggttggtacaaacaaccgtcttcgtttttatcaaaaaataattaaaataaacttttcaaaggaaactacgacggttgttatattacacccgtcttagaaggttgctttaggttctttgtgacaaccgtcttagtaaggcattttctaagacggttaccacgttagaaaccgtcttagaatatggctttctaagacagttgacatcaaacaaccgtcttagaatatggctttctaagacggttgacatcaaacaaccgtcttagaaagcgtatttctaagacggttctttgatgtcgaccgtcttaaaaggttgctttctaagacggttctttaacgacaaccgtcgtagaaagacactttctaagacggttgccacgtaggaaccgtcttagaaagtgtgttttttataattttttgccaatttttttacacgcagataataatagcgccacagtgatattctcaaatatcaatgaaccatacaaagtctataaaaatgaatatcatttcattaataacattaatgtcgaagtttcactaacaacatataaaaattacaatggtaaaaataataaatgggcgatagcctgaaaacattttaggcaagtgtaatagagaacagactctactgcatctttactacataagtaaaatctagcaacacaacaacactggctatgctaaaatcacttctctaatgggaaacaatatgctcccaacctatttgctgataaactggaaggcgatttgaaagagtatctccttgaataatccatatcaatggtactgaacaaaaaggctcctgcataaagttgcataaatataaaactcactaataatagattttaaaacttcaaagatcacattaatacagtggaactatgatgttgccaagcaacaactcaatacatttgcactttttccagatatgattacaaatataatttacttctatatagatatgattacataaatgcacggtgttctgaatgctaaaaatatgtcaatcttatctagcaccaaatatagacacttacaaaaatccctcaattaaatatatagtaaaattttattattttttaatcatttatgtaatttaatattttcaactactttaccatataattttatcaatacttatattcaataataaattattcaatttttcactaccaactaactttggagtttctagcttccagctatcttttaagttaaatttgttaaatataatgttgctcctgaaacactttaaaaaaattaataagattaatattactagataaatatgctagtcatttcaaattcatatattacttataaaataatgttaataatttcagtaatgcttcagtggaagtaaatttttcaaaactcaatctgattattttttttttatctaagaccaataatgtcatgaaagattaagtgaactgactttattactgattgaaaaaaaaacattaaagaaaattaaaagtaattttgcattaagaaaattcaaagataaatttaaataaaaattatggttttaataaattaatttcattaatttaaaaatatctcaggttgaatatgggtttggacttaaataagcgttaaaccagtctttggaagaatggaatcccaactatatactattaaaaagattccttagatgatgttataattaatctctataagtagtatttgcttaaatggcaaatgagtttgctcctcccatattgttatcacttatcacaaacttaaagttgtaggaagataaactttaatcaacttcgttgccaaacttgatataagaaaattattattttttatttcgtttttagttaacgtttcatttgctaaatcggtatggtggtgtgtttttcttgaaaggttcagtaaggtggtgttagttgctcctagctagtttccactttccgcactacactcagtaaataattaattagcactttaaattatctctatctctttgttcaattaatagtttgaataaatgtccaacacttttaacattttaaatgatttttattttaagcatcattggtcatttggcctaatttaaaacgtacaaatcgtgaattcatgatcaagaaaaccaaaataaaatagaagtagatcagaaaaccaaaaaaaagtggtcacaacacgtttgacttgagagatataacaggctgtagttgtcgtgttagacccaactactccagttggataattttttatattttccaagttctgtatgtagtcatcgtttcgaatccaaaaacgtgttttcctcttgtctcctacttgacgggggtagtttacaagatggatcattgtattagtgaattaaatatttgtttcttatatataagagcataacaacaatacttaattgttttaacattgaagcacggaccaatagagctgaagctgcttattttagctagttgtttatttaagtaacattacctagtaatttcttaacaaaaaaaaatactagaaaatcttaaatgtgatgtagtgtgtagctaggatccaccaaaaatgcattaaagcaactcaacactgtaattaacgtactaattaatgactctattgttataagaggaattctcgtcaattccagctactcctacactgtaattaggatgactagatttctttctttctcactcttcaagattaagtagcttgttgaatgagatactcctacacttcataagactccccatttataggagtgtgatttattctaaagtggttaataaaagctccttaatgctaattgtatttctaagcactactgaagattttaaatttcattttctttatgttgaatatgaaagcctcaaaatcaaataataaagtccaagactttgaaatgttgtcgtgtccattatatgcaggggattttttttttttttacagtgaggggaggggattgttggagagccgagataaaagtgtaaatctctatctttatgtgctatatatattaaaacataaaagttcttagaatatactaaaacaaagaataaaatcacaaataaaaaaagtcatttcttgcatttctttctcaacaagtaatctataaagagagtgaaaataattttcgtctgctttctatataatctcactttattatgcagaaactagtttaagaaagagtaaagataatgaaagaaaccaaaacaattgtgctttaattcccaaggctacggctcaagaaagaaacaaaaatgtgtagaatttggcgaaattgatcgccgctgttgttgggtttggtttggacacgagggtgcatatatatttacttccacgcaaagcaatgatattctttatgcttttagaatgaaagatgtgcagctacaaacataatctacaaacacctttttccctttagggtaaacgatatcgagacagttttatcaggttgagaaatagttaccataactttttgaatcggctcattactcttagatatataaatagatccttttgcatccactaattaacttctatagttatcaacaatattattcactaatttcactaacttcactagttttatcccgtcgagaaataatcataccatattttctttttctaaactgggaggaagaagatgactcaatccttccatgcagatgcaggaaattaactaacatgtaaggaagatcaatagaggccttatcactgcacgtgcctaaaaattcgagcagcaattttaggcattcaattactcagctagtttttgaggatcgtgagatttcttgaggagaaacctctaccaaacgagatttagatgactttaggatcaatgttcttgaggaggaacctcaatccaaaatgttcttacttatatttcttacaattttttttctcaaatagatgaaataattcaactttcccaaattaatagaaaaatatatactctttctttcttataatatttgtcagttgttgattgttttttttttaaataaataaaagaaaataatgattttataaaattattgttattattatattaatttatttataaattttgttatctattattaatattataagagatgtaaatgaaaaaataattaatattacattaaaaaaactaaaataataatgtaaaaatacgacaatattcttattagctcaccaatcattgtatatacatatgaaaagttttcaaatatttttctattaaatatgacaataattaaatttaagaataaaaaatattaataaatatttttagtatgattattatattttaaaaagaaatttttttataaaaatattaaatttaaattttttcagtatattagatattgtaatttttaaatattatttatttttaaatatttaaaagttgtgaaagcgttgaagaacgaattacttaaaaatatttgtcacaatattcaataattattttttagtggatagtaaaaaaaaaagtcttaagtaaagatatatggaaaattttgtgatgggaaacacaacaaaagatatataatcacgccaacatttatattttaagaagttatgaaaaacatctttataagaaaatctacacttataaattgtttttttttttaaatatatcttattttacctataaaaactgttataacaaattgtttataaatattattatcccataatttttttacatatcaaataaattatttaggttaagttagtaataataaaatttaaattatttacacaacgaaaaagctaaataacttacataagaaatacaaatcattttaaatatttcaaaaaaaaaaattctttataaaaaagttaattttatctcatatcaacttaaatattttctgaatctatttagtttgagataatttttttatattcactttctgtttagttatcgtgagaatctggttttctaagggatgtttgagtcaagacatctcaataattttaaattttttgatagacttaattgtgtttttattcctaaaatttgtgtcaaatccagttttagttcctcaaatttaaaaaagatcgttttagtcccttaaattttcaaaatatgttttgagttccgaaatactaaatttaagggataaaataattttttgaaaactatttttagtccttaaacagtaaatttgaggaattaaaactatatttttataaatttttgagggactagaatgatcttttttaaatttggggactaaaattgaatatatcctaaattttaaggactaaaaatataattaaatcttttgaaaatttataaaaattgttgtcagtgataaaattttgaatcttctttccacttaattattgtgagaaggtatattcaaaattttagagtacatttaatttgctaaaaataaacatatctttttaaaagaagaattcatggtttttttttgtttttataaaataatattttaattaaattaataaattcataaaaaattgtaatgaaatatgtaattttgattttttcgttgcacctacagatacttaagattaatggacatccttctcgagttaattggagaaagtgtttttttaaaatattattccaaaaataataaaaactattttaaataatataaattctcatatgaaaaaaataaaaatattgaaaattcaaaccacatagttttcaagaagtttttctaatcatatcttttcactaaaaagagtatttataagaagaaaaatacttttatatttgagaaagttctattgaaaccaaatttaataattttttatttgtaaaacaaaacgtgaaaacatttctaaaaatgtttacaatattaatcatataaattttaattatttctgtatatatattttgtgacttctggctcactaattcagttagataggtctattttaacaaggtcttttttttttttttttttttgagatttctaaaaagtattgtaataaacttccattgaactgaaatttattaatttaacgtttttcaattaatggatacaaaacttttctccattctatccttaaagcatgccatacctactcattattacattttaagaactaattcttaaatggtctttgttgatttggcaatggcaacgagaagagttaaatacagtacggataaatctacatcaagacatttgtattctattaaatacaagataaataatgtgccactgctaatttatatggttcaatattacaaacttaattttgtaggaacaaatatataatttaatttacttctcttattttggcaaatgctaacgaattacaaaataaaaaataactttttttctcccgaatctctaatatttttaataaaattaggattatatttaaaattgcatatcatgcgtaatcaattttgcttaccaaactcattcataaaaacgcacacagcttctgtaatataatgtgtaatacaaacctcagcttttgaatctatttaagcagcgttgaaaataaccgcacaagaaagcctacgagtccaggacatgcaatagcttttgggttgtggtaccatacgtacacatatagcatatgctagagttcattatttccacggataaaagttccctcaatatcccttaacttgcaaggacacccaattgcatatacttccgtctcactacttaattatgcgaccgtaacaacgttgaaaaccatccccacgctagctgtacgtacgatcatatatttgagagaatgtttgatttgcaatttaaaattgatgtgacatgtttttatgtaattcaataaataaaaaaataagagttttgattttatttttttaaatactttttctcttaattttcaaatgtgcattgagtcatagatggacatttcataattctcgcgtaataatgcaattacttgtataaacacgaattctttctgttaattaatgaacatgatcaatgtcaatagttttcgtgtacagataagtcttgggagttttgtttgtgttatcttcctttttccagctcacttaccaactagaatccggcataaacagtcaggggatcatgaattatgtaactacacttctcatcaatttgaagtttcagacaatcaccttcttttgttagtttgtatgtgtgtgcgtgtgtaattcaattaaaaattgttcccatgtaatatagctgtatctatgtacgggtctatgttgcttttgcatccaacaaaatgacctacatgaaagggagctaggcaactagctagcatgcatgtgtctgtttttctcctacctcataggcacacatagcacctctttaataaatttaaatcatgcactagccttttctctacaaaatctctaaacgtacagttccttcacaatcgcaaatgtttggtcatatatgggatgtagaattccaaccctattaagtactaattattatatataacacgagtgtgtatgtgtataagtttgcaaagcagtaatcacatagatttttcttgtttacggttatattttcttatcactttggtgataagccgatccttggtattattccgttgtcccgcatggccaggtagacgagggatgaaaaaatttctcagaaaatgtaccatttcatgaatcatgagagctatacaggaaagggaggaacatgcatgtgatgcaacaggttgtaattttctttttctttggcagcgttgcaaaaccaatggtggggtccaatcttattagctcaatatgccatcaaatcagtgggacgatcttagtaaaaggagactttttgatcgatcggttgatgcatcgcaagttcaatacgtgtccctggactgtggtggtgcacacttctccttgtccacattcattttgaatctctaaactcaagtaggaccatgcattaggaaaaattatgttcatactactttgttaccttatatactatggttgccgcataggatccaatggttaattcaataacatcctaaattctctattgtatttatgcttgcacgatccccaatgccataacgcttcaattgttgtttacttatgggctaccttcaattcggtcatctaaggcaataaatttcaacccctttgacgtcacaggaagaaaagttggtgcggttgatcaagtaatcacattaattatcaaatatagcattgtgatgtgtcttattaaaaatggcgatgactgcttaaaggtaaccgttgctgctttcagctgaatttgaatagtcgtatagtagacaaattgaaacctgcatttgccatattaaaaagtttcatgatacagccaaaagtgtaaagtggagacatagagataggaggaaatgcattgcattgcattgcatgcatgatgcattgctgggacagggaagaggcactgagccccaaaggcatgccccatcctaaagggtttatgagtactgagtgggagcattgaaagagcactggctgcactgcctctgtcacaggtcctacagcacaaagggttaatgaagtagtatactgatcagcttagttagaaaagaagaagaatgggtccaccctaaagccctgacattgcatttaattctcttctgcttggagttggggtgtgcacttttctgtctttacatgcttgttaatcacttggacctcgcattcaattcatgtagatatgttgaagttctctcaaacagaatgttagtatttcaaaaaaatttgaccaatagagcttgcctcagagtttgagattagagaacacaacttaattaaataattcttgggttctgaatttctttaattaatatacctgaatattttataattaagcgggaaaaaactattctattattttaaaaaattaataatcattcactgataatataaaatattatcattcaatcataaaacatcacaaatataattttttaaataattataataaaagtctaaacttatcatgtacaatatattatgattataatttgatgaagaggtaaaattattttatactgtctttttgaaaataaaagaacaaacataatgaattattataaccttctaattctcatattattcttattttatatatgtcatccttgatatacttatcattagagttaggtttataaagataaaatagttattttataattttaaaactttgtattataagatgaatctcaaatttgggagaacagctttctctttcactctattcctctttattccacttactatattacaaattcaaacatactgtcataataaaactttagggcaaattatgatcacaacgatgtcattttttaaattccacacgactcttatctttttaacacctacatacaaggtacacctactaaagaaacacattatgtaatatagaaagatagtaaaaagaaacttcaagaaatcatgagtattaacgtagtttgtcctaaaaactaatgtttagttgagagtgacaaagtggataaatggatgggggggtcttcggtgtggtctccctatattttgttgtgaatgtgaaaatctaggtataaacgaaccaaaagtgagaatgtaggagtagttcattcagttactgtcggtgcacaatgacaaggcacctttaattaggggaatgggttaaagacagagagaagcagcgaaagcacttcaaatcagagcctacaaaaggttctatggcaaatggacaagtttttccagtaatggaggggtctaaaacaacagttcccagttccttagtcggccattaataaaggggtgggtccaaacactcaccaaaccacaaaaaaagatgacataacataacccttcaatatctttcttttctcggcaacaaatcccatttttaatttgcttttctctttgtacctcacgtactgttccctccctcattttaaataaaaataaaataaaataaatttcatttcaatattataataatcactccaccccataagacccgttccaaaaagctttctccacccttttcaactttctgcttcttctaacactactctactccttgtagaaccatctgaattctccttttgactcaatatcactttaaccccagacccagtttccactctttctcttcaccaaatcacccgccacatgaaccctccaacacgaccacaacttcacatctcatacacgcaattttgtggcatatattagcccgtgtttcttgctctttccacatcaaaaagctaggctaggctctttcaaccacgtcgtcgcaaaagtgagttattacttacttagtgataatacaatattgcaacaacaacatggttttgcataggagacctctgattctagtaatcatctggttgttattgtttctcttcatattgggtcactgccatggttctagagccacaacaaccgtgttcaaattcaagcccaaatctcaacatcatggtcacttctctggcttcttgcctaaaaggatgcccataccgtattcaactccttcaaggaaacacaatgacattggcttaagaagttggagatcaccctgaacctgaggatcatatgcggattagtagttttgttttgggtaaaggtgaccattgggttcttatttatattaattttattttctccttcatcttcatctttcttttctttattaagaaacaagggaaactgattaactaatgtacatggcaggggttcttagtgagatattcattgtctttacgtttgatgatgatgttattttgtttcaagggatgtaataggtatgatctgttagatgatggatatggatttctccttgttacttgaaaaggaggaagtcatggttgtttaatttagtctctaatttttttttttttggagtgtgaatcaattaatatagacaatgaaatggtcaacagcatcatagaattttcagatacgtagtttaaatgttgttctgctgtatacacgacatcaagtgttttcattattcaatgttcaaacagtgctagtattagacatgcatgtgttgttgtatttcttctagttattattcaagaataaagggggtaaattacagtggaaaatcggtaatatttttcttttggagcgaataaaatcggtgattgacatactgaaccagtattgattcatgaggtgttttacaaattaaattgaatcttgtattataaagaagatatttcgttttacggttacttaatcagattagtgataacttaatattgaatgaacactttttttttcgttggtagtacaaacaagttgtggctggcatggaaactaccccgttgaaattacccgtgtgcaagcagcattgaactcgggtaaggtggtatcagtgtctttcgatgcgtgtggttgttgtgtgttgctgtcttgatttgatatgcacaaataaacatgtgtttgtacgtatacattatactgttgaataattgattcaagattttcggggattattatctctgtatctcacacacgagtgctacaatggcagtgtatgtagcatacacgagttcaataaataaataaaagatgaaaaaaaccaccgaattcttcgtgtatatctgtaatgatgaaaagctatttgctttatgcggtgtttcctgtgaatatgcccaattaacgccaaaactttggtataggttattattttatgtcatcataacttcttacgatctttggagaaaaggggaaaagaagttcgacctagagcatataattcgaggaatagtattattttagtgataattataataccttcttgctcaaggattatagaattccaaatttctgatctagcagcttttctttttcatatataaaacagatacgaaagtcaaacccgaatcaaagtttaaattgtagtctagcaaaatgtttaccgctaatttaatttggtcgataaattcgttgaatactaaatttgcttatatatgttgaactaaaatactttaaaatttcgttcaaaaccttccatttaataaaacgtgagttcaaaaatttatgagctgaatccaagcaatatattgaatagtttatatatagttagttgccagctagtattccatctgaaagttatgtttttcttttctaatttgttttacagagatcttaatgttgtaccccttctttcctaagtaaataaaaagggggaaaaaaatattatcaacatgccttactttggataatgtctacaaaatatgaagtttcattggattccactggaaaagacatcatgattcatgaggaggaaacgatggataaattacatttttttttatctctgttataaatatgctggagtattatcatcgtttagatttcttatttcaatttgcttggtttttcgtttctttacgatacaaattaccaattataaagaactatattgtgatgtgggagtctgtcattatctctttgctttagttgaaataattagaaatcaatggaaagtataaagtacttcctgtgctccctttaacgttttaaattaatgcatatcccaagtcctaattacgagattattgaatccttcaaacttcataggttcattttcacaatattttttccaaattagcaaaacacagctcatgaatcccatcccatacgcatcccgtacctcatactacctaactatgacgcaatgatcttaaaattaaatgacctattgctaaaagtcttcatttattttttggtttaaaaaaccacacctataattcaattttcatttcaacaaaacactctgtcgtagtgactcacattttagtgacacactacaaaaaacctggttccgtggctaaaacaagggggaaagaagatattattaattatagtaaacagcttccctgtttcaagatcattactctgtgttcccacacgtagaaattggtaatgaaattcagaataacatcaccaatgaggctggagggtacctttcccatttgtaagactgatcaggcaaaacccttatcccgaatatcctatgtgatatagaaatgtcaatggattctacgaattctaattctggaaaaagatttggctgaaacttgttctgatttcccctttccactatcaacttagtcttgggctcccttcacgttagcaccattaattttttgaaccgtgtcatgtgctgttcatatctatactaatttcgagtgttatgttgtcccagtcaaacttcagaaaacattgttatttattaaggaatagacccttcaatttggcctttgatatttaatttacttgatcattaatttgactaccagctgaagagtaccaagatccctatttcaaggcaacaagtaccattattggcattataccataaataaatggagaatcagaataaaaaggcttcgcaggcactttattatcaagaattaaaaatacacttaaacggggttcattttttggatttttggagtccataactattactgaggtttaaaaatattgttaatcatagttttaaaaacctaagacagcatgcttttcccacgtttgtcgtttaaaggaagagaataatgaacattcaacttctaacatattgtcgctttaattgcgcattagctttaatcgttttcaaaaaaaaaaaattgtttattgaaggattaggatggtctagtatattttctcttttttcttttgtcaaaatgcaacattctgactcaattctcatttgctaagatctctaatcaggtttcagtggcttcattcatgtgccctgtaattgtaggcccatgaatgatggagtagagggacatttaatgtcaagtcacatttccttattaatcaaaaggattaaataattgcaaatgattaccttcatggtaagtgaattcctgaccccacggttaaagcaataacagataatcatagtatataatgtgtatctgatattaatccaataattccagtaactcggtggattatatactttgtgctattcattcatgagcgtctgtgtacaattttattaatccaaattatgcatcttaactaggtcgttttatgcataacactcgactatcaaagagaataataatttgtatatttttcttatattttcgtctcaaaataataatcgtttgaggttgttttacacatattaataataataataaataaatgaaaaagaataataattttataaaattaattttatatcattaataatttatttataaattttattttctattattaatattataaaatataaataaaaaattataattaatattatattaaaaataaaataataattattttaaaataatttttttctcttacatgaaaattataataaaacagactaagtattaatcaacttaaaacacatgagtattataaatgcgtatcaaggttaataagtaaaaatgattgtctatgtttccaaaatattaaaatgattgtcttagttattgatttgatggacagactggttgttatgcatcttaactacagtattcatccaaattatgtagtaacatacttttccaccggatatgaagtgatgataaaaatcttatccgcgtaattacgtagatctaacaaagttataagcaataactgtttttttttacacatgtatcttatcactaaacaaatggggaagaaaggttgttcccataagaatatcataggctaggacagggcacgcagtttataaatatttatctgctagcgttagaatattacatgcatagagtttacagagctcaaattcaaaaaaaaaaaaaaaaagctggataaaaatatttaagaaaagtaaagccgtaaaggactcgatttaatattgaggatcgaagaactgtttattaggacatttaaaactttttcataccatttttagacatcttagtaatcaaatagcatattttgggccacacttttattttaatattaacaattatttcaaatatcttactagcactttttttttattttagattaaatataaacatgtaactttaaaatatttaatttaaaatgagatatattcttttagtttacattttttaaaaattcaaatataaatacttttaaaactataaaaaaagtagaattactttaatatataaacttatatttaaaaatactctaagaaatttaacatattcaaaagagtaagttctaatttattataaaaagctggatgaaataagaaggtactaaggtttgtaatgattgaactgcaaaatacaattgtgatcgaagggaaatataatatgcaatttaaataattgcacttggattgtatggttgttgttctaattaagctgagatatgagtttcatattttttcaaagtaaagatgctggcctaaggatgatttatctaaacttattagatgatgggtgtacaaagacctaacaaaataaaaagcattgcagtcgtaacgaatatatatataagaatcgtgggaatctgtgtatcactaaccagatggttagggggtcaacgataaaagtcagacatgaaagatatagatataagctacacattttatgttagtatttcaattcgcaaccatttctcatttttacgataactaacttcaacattaaaattcttgtaagtggccacttcgatctgaagaagtttgtcatagatttcgtccgaaatttacactttcaactgtgaacattctaggtggattggtgctaaactgttgtgttgctccatctatagctaatagattttcaaaatgctttcaatttgttgcaccaaaactaaaggtggattgtcgtaggttctgtaaacagaaaaccgcaggaagctaagtttgaaaggtcactaatacttgtggtatcaagacttaaaaaaaaaaaaaaaaaggacacacacacacacacacatttattttaggaattcaatgtaacgacttctatcaactactgtatgtctgtatgttgttatttggtttataattggtttattagatttttttttccttaaacattattataaaccttacaaaatgcaatggtttaagagagtcacatataagctttccaaaaagaaaaatagagtcacgtctaacctcatttctcaaactctcttaaaaaaatatcgtcaactttattttagaattgattgagaaagaaaataattgttattttagttttttaatataatattaattttttatttatatctcttatggtattaataaaaaataacaaaatttgtaaatgaattaatgataatataagattaattttgtaaaaaaaatctatatattaatttttcttgatatctaattaaaacaacctaagatgataattagtattttggaacagtaattgttgttattatttcatgtgtataattacatatttagatttcattttagaatattcccaatcattaaatttcaaaatttgaaatttatcatttctcatactcaacattcgcgattcttattcagagaagtaaatactagaaaagaacttttgaatgatacccacccacgcttaatgtgcagcattattccagcatatggaataatcagagagtataattgattggtgtttgagtttcatcatcaagatgcgtgaactctgcagtatttctttttgctgcctacacgaagagctattcagtaattaggggaatgcatttttctcctttgatactttctttacttcattagtttgagatgtttttaatttttttcctccgttgcttaattttttggacaacaaatatcattgctaattatgtgtggtcttgtatatcattgggataatcactgtagttgcggtgccaccatcgcgtggatcactgaataagttatcataaggtaccgactaccgagcatgcacattataattaatttaattttaattttagctacacttttttactcatctttctttctgtactttttaaaagctgaattttttcagattttatatcttatattcttttaacactatttttttatcacctttctcatttgttttctctccgtctggtacgtatctcaaatccttccgtagggaggtgagaggatcattttttaaccttttcaagggcatagtgaactcggctattctatacttttaaaatgaactacgcgggcagtttcaaatctaacttataaaatttagtaaatttaattttatagataaatttatccttcctaacctgttttcttgatggattaaccatgacagatcaaaatgggaagccagtcagactgtccaatccgcataataatatatacacgagattaagatgaatgttgtagcctttaaggacgtgctttacatgataaatgacgctagaggacctgtgatgtactactacaaagtgacatgcataaattcagctgttgatatcacagatatggataaagcagcaaacgctttttattcataaaaatgctctcgaacattgattgatgaactgcctcttatttttttggtcgggatattaacatgggagcaacatatcaaactttcttgcagcaaggtttcactctgcagcacttatttcccctcgttgagaagtgaataatctgctcaataatgtgcttctgacttgaaagaggtcgtgaagtcgcccatgaaccatagaatgcttccgcagcttgtgcagaaaaaccgttattgctaaggtctagtaattgcaagttctttgccttaccaatagcaattaaaaactgttgcgtgaaatggcactcgggagatgaatttctttgacatgaactggcacagctgtcgtcaagttcagatgcagctgcttctactggaatattttcactatcagcaacttctagtagatggtcggcagtgttcagagagcaaaggacctcttcattatcatcaactttcatggtatcaagtttctgctcctggctttgtgagcagctttttaccgataaatcatattgtagagaagaaacttcctttggaacagaattatcagcaagattaagttcctcaaggcagctgttctctgataaaagaaacaacatcatcaaacgatagatgtaaaaaatgaaacaaccaaatataatttaatgcctacctgccagagcctcaattatgtgaagaattccagcaagcccaagttgacactttttaacgaccaaaactttgagacagcactgtgggtttacgagaagagcaaataaagcattgctgccctgtattaattagagaatttgaacaaaccatggataagaaactggttaaactcaaaattatcaccaaaatggcacagctatacctaaatctataaactgcaaaccagtgttttaatagtaaagaaatggtatgaaaagccagattatattttgagtgttgaagtaatacattgtaacactcaaataaaaccagccaaggaagcatgcattacaataatattagcaatagaaatctagtcaaggcaacaaacctcgggcatgataggatttccttccaggttcagctctatgacagaacaaaaaaaattaacactggtgtttaaaacaaagttaaacgttagaccacaatatgataggtcaagtttcacaagctcttcagttcctttgagcaatgattctgctaattttgttgctccttcctgcagaataatgcctctatcattagaagatcaagtgggcaaagcatgctagaataaaccataatgacacagtaatgtgaacatgcagttggagataggttttactcacagttccaatacctgtccccccaagtattagtcctgataaagttaaggtccctgcaagcttgcagagggtatcgacaactggtttgcctagttttagaccactcatattcaactcagaaaacctataatgggcaaatttaatttaaatttatgtatgctctaagaaaatacaatttatgcaaagatgatatatggagatggatggtgacattggtacaattgattttaccttttcagggtagaaagcctggacagaagattaattatagcatttccagatacagggttgttgtatcctgtcaaagttagattacccattatgctgtaagattactagtatcagggatttaaagagaatgatagattcataatacctatacatagatgggcaagtacagatctagagtccaatgcatccgcaactttttgaatagttctagatgtgacacaacagttctctatattcaagctacaaagagctacacaacagaaggtaagtaaatagaagtagtataaacattttcatagctcagagtaagaccatgtatactagaacaatgttgttaatgacggatggcacaagttgtgaggcctatggtgctgacatggcaggtctcccttcacaaattgtctatggcagttggtaaaaaatccgccacaccattccgccaccattttacaacattgtactagaaagaggagggaacaacatggcaatcagcattcttcaggagataacttattcaaattggcagagcttcaggtcatgcatcttacctgtacagttttttaagattgttgaaagataagatccacatgcatcagtaagacggtttccagaaatgttaagcacttctagtcgagcaaatagcagtgaacattcacaaatctgacaggaacaagcaaagttaatacatttgcaaatttgagattagtcatgcaaaaagagaaaagcattcttttattatatattaatcaagaattgtatgaatagattatccttgtgtaaatactaaatagttaggtttgaaagttattgaaaaaaatggcctttggttgggacaaggcaggtgagctcagctgatatttcggtgatttaagacatgaaaatacgttttctttttcagaaaatatcacaactaacatcaagtgtatgcatccattatatttacgagttaaaaattttaagatatttttctgtaaaaaaaggtgtagagcaaccatcatttcaaacctcatacctaaatatcagatttaacaagatctaatgttagaaacatggaacaaggggaagagaaacaagcaaagatcaaaaggattgcaagtagtatcatacctgaaacaatgctgttgggccaaatcgattgcaatgcaaatccagagttaagccgccataagattgtcctgatgctgtgaacaccttttgaagtttttcgattgttccatttcctaaaatattatcaactcaataaaaggctaaaactatttaatagattccctcgttagtttttatctattttaattcttttcatggttttagttttcaaaccattcattagtcaccaacaaaattactgattaacagacgtagttgatggaatttgagacttgagaaccataaaaaatgctcctgaggaaatataccaaaagaaaaggcaactactagacgatttgatgacaagacaaataccgcacgatccacagcaaaaaaaaccacaaaccaggaaaaaaaaatttacctaacaaattgtgagagagatcaagcattgcaaatgacttatgggaatgcagtgcatttatcaatggggtaatagacaaatcttgcaggtcacagtcagacacaacaatttcatcatctgaaacctgtggacaataataagcaaaaagcagttgaagaaaaaaaagaaagaaacattcaatccaacatctgaaaatgtgatggcatatctgtcaatgtgcagtggctacgaaagaattgatacagctaagatcccccttacctctaaattgtaaagcttcttcagtaccttgatgttcggtacctcagacaactccttgcagccgtctacatacatttttatcaggcacttgtggatccatcctgtaaaggataaaaaaatcatttgcttatctcacttagagattgatatggaaagctaaaaattgattttaaatacagcttcaatacagcataagcctattttccaaattatgcatacatcttcggatgtcaacttcctatgcttgttgcttacataaattgcagtttgcaagatcaatgaatatcaagtgatgagtcagattaatgttaattttttttaccaatagataacaaccatcaaccatctgcaactagtctagagatttgaatatttatgtcaacatatgtgcaagtagttaaatatattgaagataaagttcttgtcaaaaagccagataagaaaaagaaaaaaaacaaggagatggcataaaaattgaatggtgatatcactgaataaacaaaaagcataagtatcacataccatcaacagaagcttcaaccatgctatttcccagaacttccttcagatgttcaacagtttccagggattctaaatctcttccagcacattttatatgctcaataatgggcaacaaacctatttataaattcgtaattgtaagaacagtcaagtgcactcagcaggaaaagaatatcagcaaaaggaaaactgcaataaataaatatataaaggaataaaaagttgatataacatcaaagttgataaacaaagaagaaattaccataaatccgggttttgattattttttcccaaattgtaattttttaccagaggggcaccaatcttttattttattacaacaaggagcacatgtcaccatttatatgcaaagccagaattccccaaaccctcttccttcctatcttttatacaattcgtaccaaattaattttcaagtcaactgggatcttctatgctaatattataaagtgatagaaaacacttcaaagtaggaactgcctaccctctgatttcttttcagttggaaattgtagataatataagcatgcaactgcagccttcaaagagtcaatgttcaaatgatcaccagtggcacacaaggttgtttctacatgtattagatcattcccaatccggcatgtaatatattgctggagccagaaaatatagaggcagcaagttagaaaaatatcaattagatgaaaatgacaatttggcaaaaggtcctaaatatattcatactcatttaataacagtagaactcacgtcattttgggaatgatgcaacatgggctgggaaatatcgttttgtttgccagagacatcagtaccacatttagaaccaataggaaaatcaggttcagcaactatatcattgctcaaagacctggagtgtctgccagtttttgtggctgtatgtggactcgaacatttgaaagaactactactttcttcaacatttattgtacacttggatccatactccgagataacctgctatcccaaaaaccaaaaaggctaggcattcacatggtgatacttgagaaaagctcacacacgcaactaagtggagatttcattacctgaattttacaaggactggctttagtcttaactgcaatcaggcaagtatcaatcagagcacaatattggtacaagggaaagtttgggtcagagcaaagcaagtaacggaaaacatactggcatcataagtgggcaagtcctctactgggcaatgatgattctttctgcttgaacactccacttcctcatcatcgtcatcatcggaaagaattacacggacacgtttacaaccaacaaccatctgatgattgatggtttgatttttcagactactgggtgactgcttatcttgcttgttagagttggtaagactttctttgtggcatgctttatttttggatgagccttttatggactgatagagtgacatgagaggcgtgtcatttttcatttcttctccagtagtcagagtttttgatcgagaagttgtctttggaaagcaaaaatcatcagacccactgtttgacagataatcatctgcttcggtatcagtttcagagcaaaaatcctctggcatacttttagcttctgcctctttttcttccgatttcttcagtttatcgattagaagcttcaacctcctataaaagatcacaattgatcagcattaatattacatgtccatcaaaaggacccatgataatggaaacaatataatggatttagttcacagagtatgagattttggcctccagaggtttgaattctaaatggatccctgagtaattcaacaaaactgcaagaaatgtatatataaggaaacagacttccatgaaccagttacctggtttcatcctcatcatcaaatcttatcatgttgctataatgcatattttccaaggcagagagttgcacatcaggaaggtctgcttcaactgcgatactgcaatatgatgcaatcaaatcaacacagttcatataagaccatcataaggatgccaacatggatgtattttttaagaaaatctaagcaaggataagtcatataagtagtagactagtaggcggtcaagtttcattctagtattggctgaagcactgacttctaactttgtaacagccaacatattctcaaaaaatgacttctgaaaatatgtaaaaagaaaccagtatgaccagaccaggtcatcaacatggcaaggaatggaaattacattatgagaaaattctaattctaataattttctttcatgattcagaaaccatagtggtacccccaaccaagctgcatcaagcctgaggaaactattgtgttcaacttacagtacatagttcatgtgtcttatgcaaccaagttgcatcaagtcgagcatgttgtgttcaacataaattcagctacttggagattccgttataattagaaactatttcttcttccttcactaatttcaagaaataaaatcatccagtaaagttatatggatattattacctgtagctctcttgaaatgcatccaatgcttttctccaattttcagtagaatcgtaaacattaccaatattaattttcaccattgcttgcccctataaccattattaggaaagcataagaattaaccaagtgacaaaaaaaaaaaaaaaaaaaatcaaacaaactatttcagctacatttatctttggatactaagtaacctaggacattgacatgcatacaaaaatttaagtgttccatcaggatttgaattgtgtcatgtcacactcacacaagagtgttagatgttagatttcaacttaaaaccaattaactctaagtgaggatattaaggtggatgtgcggatatacgaagatggataagataagaaatgaggatattcgacgaaaggtatcagtggtaccagtatgtgaaaagatgagggagcatagattgagatggtttgagcatgttatgagacggccattagatgctccggtcaaaacaagagtctgttaccaagaactagatacaaagagaggtagaggtcgaccaaaacttacctggggaaaggtagttaaacaagacctaatggagtgggatatagattggcggacggtatgtcttaggatcgagtggagaaaagctataagtctggtggagggttaaaccctttagtagtctatgttccagttgtttccttgttttaattctttttttttcttcttttcttttctcctctcaccattcttttgtaactgtgtttctctattttgttctattttcgatttatcattgggttcatctaccaccgaccccaattaatttgggttaaaggtgctgttgatgttgatgttgatgttgatcccgagaattgagacaggcaatatgggacttcctaacacccccctccacagatgcctaccaaaacaagcgagcttactagaatagacgagaaccaagatgggctataggctttgatactatgttagatttcagtttaaaaccaattggttctaagtgaagttgtctaacagatatataagttgcaccccgagaattgaggcaagcgatgtgggacttcctaacattagacacatgtctgactaacataacatggaaaaaattcttatgtacagtgagtataatgcattcatttaccacggttttattataaagcatttccaaaataaatcttactgcatagacttcatttctgtgtcacaagttatgttttagttagattgttctattacttaatttttcttgacatgaacattgctcctcttttgaagtgtccatgtttcattgatatcaagcaactaaatctcagaattttcatgttttgtgtgtatgggtaatggatgtatttaaagttacttcctcttgattttgtatataaattataggcttaatcatatagattttgaagattaaatgtatgattagtggcttggagtctttaaaccctcattttgcaatttactcaaagcatattttgttcagcttaattctagaaatataattgcttatttttcaaaagctctttcaggaagctaaaagaaacaagttattaattcttccaaaaataagtagaatgaaacatgaattcatagtaccaattatttgaaataatcatggatgtttctaaattcagatttgtgacatattgaataaggttaggttgaaaaggaggaaaaaagaaatgtcatagaatgatgaaaatgtcacctctaagttaccaatatttttgtacatttcccaactctttttgtaccacttgattgctttgttgaattttctgagtttctggtatgattctgcaacatccagatatgaatcggccagtctctgcctatcacagagttcacttgctattttcttcttctcctttgcaaattcacaatgctaaacaaaatattgtttagtaagaaaggtcacacttaaggaactactaaacataccatagcttcaaaaagtctctgcattcaccacgtaatactaataggtcattaaattatcaaatgcggaggaaaacatcatatagttatacctacaggcctgagagaaatacgtgcatcatctcaaacttcaatatattactgaacaaagtcttacattttccttaaagtaaatcatgaaaggttttcaattgaataaattgcacaatgaaacaaaccatgcttaaaacaacttcaatgaatctgtgcttaatccataacttacaaaccatgagcatgtgtacatctgttccttaaagcaacattaatagaccaaaccaagaagacttcttcacgtgtagcaaaagggagcagtaaaaggtcaaatggagaaattgatacaatggaacatagccgtgcaggttaagcatttgtttcattaacatggtaaataaaaattgatcatactaaagaaatgaaacccaattggtgtatcagaaaaattatgaattgcctcatcaaatctggaaaaattccagacaaaatagccattccaagacagacatcatttggttaacagaatcaaaccgaacacaatgatagagccaataccttctcccacgcagagatcatccttgctttctcaactaggcgctctagaactgcattctgctgcagcaagaatttgcgctcatttggtgtccctctggcagtggctatatctcttttgagcttcttaaggctctgctcatctttctttatatcagccattaccttaacagcttctctcacagtttcaatattctgctcgatttgccttaccaaagcgtcctcatcctccaagctcttcgccaaaccaagcgccttctcgtaataagcacttgcatcttcatacttctgagtcctgtaatgtacttcaccaagattaatataccccttggcttccccttgaacatgtccaattctgttacaaatcacaatatcagtcttaatgtgtttcctagctttatcccaatccctaagttccatatacacattcccaaggttgtggtggagtctactgcggccatcatcgaattcagcgacctcctcttcctcacaaatctccaatcctctagttaaagtcttccgcgcctcgtgcaagttgtcgagatccatctccagcatgcctatgttgttgtgcgcgtcgatgtactccttgagaaaagaggacttgctgttgggaggattctccttgagcttcaccgcgagattcatcgcggacttgaagtacttcttcgcgttgcgaatcgagttgtggtcgtgctccgatcgcgagaagagctcgtggtaagtgcgaccgagttgcgtgctcgcccgctgctgctcaacgacgtcgtcagcgtccctcgcaagctctaagtgttttttctgtgacggaaaaaaaaagtaaaactctcagtgttaaaagggaaataataattagggttttgggaggaagaagtgaagcgctgacctgataaattagggcatcggagaagtgttcgaggcggagatacatttcgccgagggattgacaagttggtagcaaatgcttttcgggtaaatgtttgagcgaaacgtcgtaatcgattcggagccatttgagggcttggacgtactctcctcggtttttgagtatgtcgccgatgacgttggcccaccgcgcctcctcccggtggtttacctccgccttggcgttccgatacgccgccttcgccgatttcaggtccgcgtccatctcgaaacgacggcgaataaggtgtcgtcgtgggttctctctgaatttagaaaactcttctcttctcttttctttgtaaggtgcgatttgcaaaggcaaaggcaaatgttagtctattcaaggttcgaatgaatttgctgtgtcccgccaaaaacactttccccttgtttttctctctctgttttttccttctttttttcgtttttttttaaaactcgtttaatagtttatttctcttgttattactattgttgtggataaatttttgtttttatacattgactgtttgtgtaatgtgaaataataatgattagcaaaaatattttgtttacacaatttgaaaaaatatgtattcacaagaagaaacacaatatccgaaagaaaaaaaaaaacacaaaaaaacaggccataaaaaacatttataaaaaatcacgtgactagaaaaattaacaaaaaattatcattcatacataatttttcacataaataatcacatacagaacaagcaaaaaaaattatacaaataagtaaaaagacactcaagtgagtgaaaaaaatattcaaattagtaaataaaataagtgagaaaaaatcatgtagcaaaagagaaaaaacattaaaatgtacagaaaattaaataataaaaaccatttaaatcagtaatgacaaattagttttaaaaaatcttaaaaagaaaataatatgtaaataaacaaggaaatcattcaaatgggtgagacaatgaaaaaaataactacaacaaataagaagatttaagaagaaaatttattgccttaaatgctaatttgatccctttactttttatagttgtgaagttttggtcctcataagtcatacctataatatttataattaaataatttattcgttatgttttattataagttagaattatatccctccgttcgtctcgcatctaaataggaatttgctaataaatggaaacacagtggattaaagtaaggtttggccctccctcttccttgcttcgtcaaaggcaagacaggtttagcacataagtgtttaaaaaattttaactcaacctatcgcaatgttttctttgggttcgtggaaacttagattagtaaaacacatgaaaattcttcttcaggttatcgtttatgaaaataaatgttaaaatagcctttgataaaattattatttagatataatatagcgatggttcgaataaatttttcaactcaactctaacttagctttattgaattagagaaactccgaccccaatcataatcttttcctaaccaatataaggtcaaacaagtacccacaagttcaaatttaaaatgtcatgtgtatgcgatatcaatagtcatttacttaattgatagcttaatttatatatatatatatatatatatatatatatatatttcacttaaagtcttttgagtgatgggatcaaaattttaattttataacaatcttgatttcattcaattatgtaaattttattttgacattttaacaccgttagatttaaactttttattatagttgtcggatcgaaatattttaaaagaatataaaattttaaaataataatttactatttctaatagttactattattattattaaatagatatagagaaaacaaataaataagagataatgcagtgttaatttaaaaacaaaattatttttagaataattatttaattttagaatatttactttcaaaaataattatttaatatatgtatattaataatatgcacatatataaaatattttatatctatatatctatatgtaaattacaataatatatgttttattcttaaattttaaaaaaaattaatttaattttttattataaataaaattatacttactatattatataataaaatatgtgagaaaatgaattgatgaaaataattttaaacgtatatttaaattttgaattaattttattaaaatacatttaatttgattacttttaaaggatataatttatataaaattagaaatcacgatatatttttcaattttaaaataaaaaggttatattttgttatttgtaaaatataaaagatatatacttttaaagcattttttttttggatgaaataaacactattacatatttatttttcattatcaacgttagattaaaatgctaagagtactatcattttattttattaattaatttgttccgttgattttaaagacaaaaaataattcattcaacttttaaattgatcaatacttataaaattgacttaaattttgtaactttttataataacatataaattttattaaaaaatgaattgaccttattatgatcatgattaaaattattattctcttttatatattttatattcttttataaagtttaggggtcaattaacaagggtatttcttcattctttatccgtttaattttgtataaaataagaaatgaagaataactatattaagaaactttaaaaacatatgcatcaaaaaaatacaataaatatgcaacatgcaaagctgaagtcgaatgaatttttttcatgttagtatttaaagttagggaattttaaatactcatattatatcatagcttcttctttttgtttcattttgctaatcaattactgagtattagtatctatatgacaatctctttatggtattttttaatatattatatctatatataatcgcaaacaattagacatcaaaataattaagttaaaaaataataataaatgttttccccttacatcgtattgattatgtgagtggaaaattttataagtatgaatttttcccacaccattattatgattatgtggaataaaactaaactcgtgtctttaaaaaaattagagataaattaattattttatattttttcctttttttttcttattcaaatattaataaatatgaaatctatagtttataagaaaatatttgaaatattaccttaataaaatataagatttaatatattatattttataatgacaacctcgtgaaaaaattgataataatttattttagttgttttttttgcttaattgtttcaattgtttttcatatatgacttattttattttgttattgacttctttttttgtcctaggccagagatgtgtgcttcaaaaattgacccacaaattttttttacacaaaatgagaatcaaatacgaattttctattttgagattgaaaattttacttgattaatattcaccttttaaggatcaattaacatatgtagtttttttttattctgtctttttatttgtttttttttttttttgcttttgcatacttaatatttatttctctcattttgctactgcagtttgaaagaacaaaaataccactcgatgttttatttatttatctcacaataagtgacatttgtatagaaatgagagataaaaactcaatatctaatgaattgaatttggtggagcatatgaagtgacgactgacgactgataaccaaatattacataacaactcatctcaaatatatatatatatatatatatatatatatatatataaacagacaagtaatgaaatttaaatcaaaaacaatttgcaataatataacagtaaaaactagtatctctcttaaaaaaagaaaaatttaatatcacataattgaaactaatattttcaaatgattaaatgtcaatttattaatttttatttttttacaataaaggtatttaaaaaatattaattatgaaacataaaatttaaatacatgtaaacatagtattcacaataaaaaatgaatactcaaatttaattaattattaaattatatgtttaacatatatatatttatatttaatttatacatctcataaaactattaccttattattacttggaaaaagaataatcaaaataaatttaaatagactaaatgttttaaaaaattgaattaaaaatataattaattatctttcttaattttaatgtaattatatttaatatcctattagatattttttactattcattaatatacatttcttttatatatatacactaaatctatatatatatatatatatatatatatgaaactatatataatttcatcaaatttcgtacggatttaaaatctaatatataagtaagttatatgtgaaatcaacactgacatattagaatatttaaaagacttgagaaattcacattatagttgactgtagtttttttttcacctacatgcgcacacccgtattctcctatggttgaaatagtctcataaaaaaaatattatttttcgttttagctgtgtcattatcaagaatagtagtaactttgtaccaacaaagtttgttaaaatttggatgtcacactaacataaggatacaattttaacatgtaattcaatttaaggattaaaattgcttagttattacataagcgtgaaagcacacatactattagtgcatttaaacctattttgaattataaccaaatcattaagtagaagaagtgaaggatccagacaaataattaatgaggcactagtgacaaatataggaaaatttatttatgtttgtacacttaatagtggggatttggggataattttttttaaaaaaaaaattttaaaaaataaataattataaaccataatctaaaggaacaaaccaataaacagaccaaattacttttttagattgaatagaacaatgaaagaaacttattataacttagtgatgagattttaaaaaaccatgatgagaacatgaaagttagtttagatataagtattgagtttgagatatttgaacacgagctattataatatagactaacatatttcttcgaaatacatacggttaaactagaattctcatttcaacgaagagcaatgaccttaatcaccttataaacaagtgttaatgcatgaattataaatgaaaataattaacaagcacgacaaactatgtaacaaacaccgaaaataattaacaactacctacaaataagtgttaaaagtatattaatattttaatagaaaaatttaaggagaacacttatctcaaacctataagatagatccgtccataagtagaagtgattaatatgttaaagttaagattgaatcatttggatattactcgaattcgatctttaaataaaataattgttaattagactttacttatttttcaataaatcaaatttttttctcttaatgaattaagacaaaatatatattttgaattataaataataaaatatgaattgtaatgtaacatgtgaatccttttaatatatacacactagtttaattaattaattgtaaaaaatatgtatatatttttttattcacaaacttcaaattcaaaatttattttaaaaaatcaaacgcaatatcatttaaaccaataaattatatataaaggataacttttatcatgcgaaaccaaggccaaaacctttgagtcagcatacataaactatttaataataagagtgaaagaaatttttaaagagaaagttttaaagctaaatacatctaggataatttcaaattaatgtcaattataccatattaataaaatttttgacgggacagatctttgaaaagaaaacatctttccagttgccataactaggaaacattttcatttacaccgtagtatttacacttaacttcataggtataataaaaagatgggatacagcatgtaactattaaaaagactagtaaaacatttaatatcccaccccttatcctaaacaaaaaagaagggaaaaaaagctagggaaattgtaccatcgtatttctcctcaataaatcttcatttcttcttgatattctattcaatcatttctaactttattttcaactcacccttagattcagatgaggaggaaacaatgttgggaaaactaaagaagctttctatgtcggagaacttacagtcgaataatgtccaattttcagatgcaaatgaggattgactccctctataaaatcctgattcagcatacatgaatgaaaccatagaaaacttattatcattgaagtcagttgttgcatgaacatgtgacatatctgcacaaatcatgaaatcaaacctggtcaatatccatgttatcaaagttttcttttatggttgatattgcagctgaggtcaagggacctaaatcatcagccacaaccacagttgcagtcaaatgttttgagcttcctttgcatttttgccaactccaactttctctgttggctctaaccaatgtttggagaaaccaaataatcaattgcaataacaattctattaactcagctatgaatttaacattatggtcagcaagttcacatttcacttgatatcgagacagcactatcactcccaagatcgaatatgaaatggacatttgtcgctcgtcctacacataaatgccatgacgttttattcaagtaaataactaaattcgtgcaagagataaattaatttttaaaaaataaaataaatatttatttactaaatatattaaaaatacaaattaattttattattaaatttataaaattaatttattattaatttataatatttaaaaaccaacgattataaattatattttttaaaaattaatttaatattaaattataaaattttaaattactaaaacatcattaaattatctatacatcaattcattatactttttacattaaatttaaattttttatcttttaagattaatttgtgaccgtgtcaaccaaattgggaatttgcccttttagtttcttcgcgtttccgtttcaactgtttgcgagagaatggagttcctggacgaggacgctaggccaaggttcgtgttccagtccggtgcagcagcgaggagcaccgagccgtcgcacccgaaccacaaacctaccaagccattcctctttgccaccgtttctctctcctcactcttcctcgctctctccctcttcttcctcgaagcggagcccttcaaatcgctcctcttctggcttgcactctctctcctcgtcggccccttcgcccctccctccatcactggcggcgacgtccgcgtcggccgcggcgaggtcgtcaacttccccgatccggagcccgagcccgacgaggacgctattaggaagtcctcacaacggcgatccagacagcggaggcccgaggaatccgccgccgtaggcccggtggtttccttcagcacggcggagaagagaaaagaatcttctggaatcgagaagcgtgcgacggtggtggaggaggagaaggagtggagcgaggaggatgtggaggtgctgaagaagcagatggtgaagaatccggtggggaagccagggaggtgggaggcaatagcggcggcgttcggggggaggcacggagtggagagtgtgataaagaaagcgaaggaattgggggagaagagagtggatgattcggagtcgtatgcgttgtttttgaagaagaggaaagcgttggataagagggttgtggaggagaatgtggatgagggtgagaaagttgttgataatggttggagttctgctgaggatatcgcgttgctgaatgctttgaaagcgtttcctaaggaagtttccatgaggtgggaaaaggttgctgctgcggttcccgggagatccaaggctgcttgcatgaaaagattcgccgaattgaagaaagggtttcgaactgcaaaagctgcagccgagtgaacactgaacactctcaaagggatcgtttttttgtttaattttgatatgttaaggtaaatggattcgtcgacttgtaacttaaacacaatttttcgtttcttgctattttgagttatgatttatgttggcctccttctaggtgacactcaaattgtggttgtgtaactttataaaatgcaatgaaccgatcgagattgtgtattcggaatctcttatagtgagaataaatatttaacatttcgacttgaatcttggaacttttctggtttgcttgttgatttcattttcaggctttcagcttggtgaagttttacctattatctgaagtctttacctttttacttttatgccgaatgggtttagactctaggtgccaggtttttgttatttaggctcaccttgctgccaaccattcccctagtttagtttgtggaactttgatttaactctttctactgtcttggagttttggattttgtgcatgttcgtcacatagagcctttcattttagcatcctattgtgttaagttctgatttgtgaaatgcatttatattggatagtgatagtttgggcaattggactttcaattacttttgttttgtgcaaggtgcttagtgcctactgtttcaaacatggctaataccttagcaagttgtgttggtttgcttgggttatacaaaagtttggccatgtgttttatcagctggttgctagctttactaacccatttaacattactaatctttaagtggggtgtggggattgccttcttatctctcgctaaatttcagtttaagtgctccacatctaattgctagcaccgtattggggaatattgttttcgttcttgcattgtggatttagggattattggtttatcatagggattattccacttgcactatgctaatttagaaaattacactaacctctcatgctttgttattttaaggggattgtgtgtacagtccatagtccatactctgtaaataaaagtgagatagatgtgtgtaactttctacataaggataatatataaaataagggaagtagttcaaacaagcaaggtgtaagtatatctagtgtgctaaccttaagggaggtctatgtaattaatcctttatgtcagatgatcttatcttggaaccagttgcgtgttggtacaattgggtttgaaattttgatttcagtatatactactataatattaccagagtcctgaaacttgatcagtgtatttggctattgaaaagttacatcttttacaatattgcttacagataggttggttagatttagtctcttggaactttacttgtcatggacactgaatggcaacttagggcaaagggggataaacaccatctcatctttctttgtctcagtttggttattatggtttatgtggatactggatagagcttgctgagttctgaattatttcatacttctattagaaaattcagattttaattcttagccaacaaaataacagttgtcatttaaagccagatctggttttgcatattgctttggctgactgcctgtcatgtttgacttaactttagtttttcatattgaaaaaacacctttttttaagctaagaaaacgattagtttgttttatccggaattcttttttaattttgggtctaaaggaagtctcataactttagtctcattgttttatccggaattctttctaaattctttcaccaatcgttgcattccgtttctgggtgtcaaaccaatacaatactactatcaagcaccatctcattatcatgtaaaacttttatacaataggctaagtgattgatttgatgtttcttagtgcatgtttggatgacttttaataaaattgattttggatgaaattaatttacgaaattgattcagttaaaattgattttaaagtgatgtaatttatgtttgtatatttttattataaaatcaagttaagagtaaaattcagtataaattttatgatctaacacaaaacctactcaaagttacttaaattcataatcaattgtttaacattaaagcaaatacacttattttaaccgtcaggattcccaacaagaaaatatggattatgatcatgcattctctcttcttgtaaagctcgatgttgacatagttacatataaaaatcttgctgatgaaaggaggaaataggttattaagctcaactaataaatgattaattttaagatttttcaaaatacatattgaattataaactaatttataagataattttcaaagccttaactaatactagtaaatctgtacaaaatacattgaaatgcccaatactgtgattctcctagtcatatcccattcaccataattgaatgaagaaacaacacaaaagccacttaacctatgttaacaggtcaataataaaatgaaaagaaccaatctatttgaccttgtcattctgataagccgttggtacccagattgaagccactgtcaaaggccttgacttccaacacaaggccgacctactcttctcgaattggacccaataccctccaccaaagaggcttaccaagaacttggcttgtgaaatattacatgtactcataggaacacgtttaaaccctttcaaggaataaaacccttcgtcccacaccattatctcctttctctcacaaggaaactgcctcacactgtctaaaattctgagccccagaacctctttctcaatcagggtcaactccatcttgtggctaccccatagactactagcaagtgaatcacaaagtgtagtgtagtgatgcaaagcctcacagaagaactccacaaaggacatggacttgagcctagaaaaattaaatagttcttcttccactaaaacaacaagccttggggacaattttgtcacgccatccaagaaaattttgaccaatgagaagctcctattaggcatccactgatgtatcatgcagttgactataagtgtttgaccaagttcaattccttgaaaatcttcttccctttccatcattaactggtcaaacatgaattaaaagttgatagaagctgcaaactctttgagccttcttcctgcttgttgagcagaatcagcacctctcaggtccactgtgatggctgttactctgaggggagtagcacttttcctcattgcaaggtcaagtatcaagggtggccactgaatcccctccatgatgtcaaaatcaatgatgtgaacattctcaactccttctgtggcttctaagattgcttggtttgcagtgaaatgagcaaatttcacatagggagagagttcttggagaacctgaaacacacagaaagcatttgtgtgtgtggaaacagcaccacactgtagcaattcaggggcatttgtacttttataatagagaccctgagtaaagaaaagagccaacctgctcaacaagccatcaccatattctaaagatgaggcattgttaagtttctcaattatgtctgaagcaagagcccagttctgtgcttcaacagcttcagctcctgttagcaacagatcagctaaactagtctctttcattagctcttcttggattcccttcaaacaagaatccccttcttccattgaaaattcagtctctagtggatcattatggttcaagaaaccaaagtcctggttgtttgcatgttggtgcagcaatccttccatggactcttgatcaatcatttcatctagaaaagtatttggtaataagagatcttctgtttgaaatggaaatggattttctaagctacactcatggagttgattcaagtaaggagggccaaatgagtaaccagattgctcgtaatccatggcattcatagcagatggtgaaaaaataaaaataaaaacaaaaaaggcttaagtggtacacctgggtagaaacttaattcgagtactcttataaatagacaacctaatctcgaattatgatgtgtattggacgttgacaaaactgcttctagaagtagcttaaatgataggaacggagtaagattggtatcagcctactaggaaagttgaaagcaatagcccaaaatatgcttgtggataatgtatacgggaatatatgacaaaaatgtatgtatgtaagaagatttatctagtgaaaaaaagtattttataagagagtgtcaatagcaaagaaactccagacttaattatccctaatattagttttgtcaaattagtagacttgcataggtttttgaattatagattttaattaatggaaaaattgttatctattgaaggatgtttaggagtgtggttttaatgtttgtatcggatcattatcgagcatatgaatcaattgacgtaatattattttagtttaataaatgattgcaagtttgaatctctgaatatacaatttatgttaaatacttgaggaataattttgtcatccataataatcttatataattgaaacaattttgtttgaagtgaataatatttgcggttgtaaaaaaaaaaaaaacttcatgtgcaatttagatttgagtaatctgtttgtcatcataacaggtgatatgatttcacttgtatctttgcttaatatccctaataatgatttgaatgatcataatagtaagataaataaaagtgaaagcggatgaaaatgaaattggaagttaaaaaaaactaaaactaggtaaaaataattaattaaagactaaacatcaaaatttgaattttataagaactaaaatcaaaatttgagaattttcttaggacgaaaaacacttggtcacataataattgtgttgtaaccatttcacacttgtaggccatgtagctcttatgtcaacgcgtaaccaaacccatttgacaaaaggggtgtaaatatggacaaaaaagttaataatagacgaagattatttaaaaaaaaaaatataaagagtcatttgtaggagctaaaaacaatatttaaatcctaaaaaatacatattcaaatttatttttaattcataaaaacaataatacaatttattctattgagtggatcgtgcacttttaatttttgaaaaaaatatttagatataaaaaaatgaatgttaatcatatattcttaaacacactttttttttcatacattttgcttttaacttatatttattagaaatcgtaaaattatgaataacacataattaaataaagaataaaacttgcattattatttatctgagtgataaaactctcctttttgagcatttaacgtgctcagtggtttgagataattgttctcacttttatataaaagacagaactacacaatattaatggataattgtgctacacaaattctttctttaactataatggataaaaattaacagaaatttattgtatatttttcacctttgataactaaaatttgaatttttatattttaaagataaatttgttaatattttatatattcatgaatgaatttttttttaattctttatataaagattcagaaaatattggatctccaccaacacaagcaaattgtcgataaaattctaaaatgaaattttttttgaccctatttttttttatccttatcatttaggaaagacatgaaaatttcaggataacaaacattctctaagacaaaaataaatatttatccttttttaaaaatgtgaccaaatttttttaacaatatttttattaactattagataaataaatattaaaaatcagatatgtaatagtgtgaatacctccctcaaaacgagattaggtatgcactgttaagctacaaaaagtatgtgtgtgattcagatatatttttatatgcatggtaagtgacattttgcaagttgaactataatttcagtggcgccttttcttacttctcaggccttcttagccctggtaggaggaaaataaaagggagagaaggcattaaattaatttatgttgttcgatgcatgggaaaagagtaaaaatatttttaaaaatggtagaatttattgtataattcttcacatatttttacttatctatttttaactaaatattttttatgtctattttatttttatattttttattttcattcaccatattttttcccacaacattaaacaaacggactctaaatgtattatggtcaatgatacatcaatgatgtcgtcatttctgaagtaagatgtaaacatgtcacatattaacgtacctagtagcctaataagaacaaattagcatagagacgttttggttggtaatggtcgctccattggtcccaaccctccactaatgttctctcttaacatattaaatgaaaaatcataataccagccaaagtaatgggttcgtagttgtacttttgtatgtaattgtcacatcatgcgccttccttttttttaattgcagaaggctcaaggcttcatttccgggaaactcttagaaaaaatatttgcttgatgggaatggaaaagaatagaaaaggaaattacaaaaaaaaataaattgtgtcgagagttgtgagctgtaaaatttaaattatttttttaattttttaaataatgctctttccattttaaaataattgatataatttattttatataaataaaaaataaaataataattttacaaaattaatcttatattattattagtttatttataaattttattattcattattagtattataatgttataaataaaaaacaattaatattatattaaagcattaaaataataattattttaaaataatttttccttttatacgatacttaaaataagacggatggaataatcttttctttccaaccaaaccaaggatgagagttgagaataaattcatgccagaaatgtcacgtgaaaaggaggatcgaagctccactatataagttaatgattacgggtcaataatagtttctatctcattccttaaaaaaaatagtttctgtctcataatctgtgacgctataaatttatcccatttacggtgagagactggtttttaattaagctaaatgttaattaatattttaatgatactagttaaagaattaaaatgtttttttattgtaatgtgaaaaattgtgttatccaaaatatttttacgtttttcaataatttttaataaatatttttaaaatattttaaccaatattaaaggatattaattaataagatcttttaattaatagttataatttttattgtattttctaaagtaatcttgagatcttaatgaatcaaattcgcatgtcttataattttagaagttacaggaatattttgaaacatgaaaaaaaaatatggtgcgtgtggcgtatgtggttcccctttaagttaacctttttctctctctaaaagtttgtcctttttttcttttcctttatatcgatcactatagttacagtctttttaaaaatattttgttatcgttaaaagggcatatacgcgtggtatgtaattaaaaaaaatcaaaattaattccctcaattttaactgagtttaacttgactaaaatttagttcaagtttgactaagttcaattatgattgattaattaataaaaataaaaatgattgattagttaaattaacaaggaataagtatcttaaatttgcttgtcaaataaaagtatcttaaatctcactcatataatcttacataaaaaatatgttttattaatttgattttcataaaactttttatattaatttggttttataaaaataaaacatattttttatgattttcattggtaattccattaaattataatttgacttgactaataaatttatatgtgtaatttaattataaatgaattaaataaactgtaatagttaaacccctcaaaatgaattaaatattttttgtggccaaaagtcccaaatttgtaaatttttttcatttttgagcaattttcttacaccttttttatgagattatgaaaaaatacgaaacaaaaatgaattttggtatcttttgagtatatttgaaaaaataaaaaaaaataattaaatatattaatcatataagagaacggtctaacataattactatggaaaaccataaaaatatgtttatttttatagggaccaaattaataccaaattttttacaaagatcaaattaatacttttaaattttttaggaatctcatacatgttttatcctaaaatttttatacaacttctagtccttcattaattttctgattgaaattatggttcttctaaattttttacctatttttagtccattgttatttttattgctcaaaattagtcattattttgtcaatttttagtctaatcccttgtttattttatatttcaaactacctttgaaaaataaaaataaatgaaatactaaaaatgaacaatttattttaaagaaactaaaaattatgacaaaattaataaataactaaaagttgtcagacaaaaaattataatatgaaaaagttgagaaattaaaaatttaactaacccaaaaaatatataatcatatttgacaatcaacttatcaaaattaattgttaataaaaaggttacatgaccacttaaaaaaatgtatatttatcttttgatattaaccatacaaattatctaatgtttaatgtttacaattttcatttcttacagtaaaaaataatgtattttagatcttttaatgtatgaatttaatgcggcatctagctacaaaatggacattataaagaatataatatacgagaatctaaactaattctaaaatagaagattgaccaactaaaacaaaaacaaaagtaaaaaaaagttgggcccgttggcccaattctccatggtcctatcaaagaaggctgaagtgcaaatttggagagcagatagatgcgcatacgcaaagcaaaaatagagaactgcgtagcgacccatcatagaagatcacgatcttctgaaacatgtctggggaagaggaagaaaacgccgcagagctcaaaattggagacggtaattaaattctctcatagggatagggctagttgctccaatctgttacaccttacgcattccgcaacttttgaagccctatattgtaatttctaaacttgaattaggggaatgtttcatgaagactgacatagggttaggttacatgtatctgaattgaggaaatcctagccctgtatcgtaagcgtcggtcatttaatttttagtttataactttatgaaattctcattttagtcgctaaagtgtaaaatgaagtggataagtgatataattaatggcattttgtaactaaagtgaacaaacctgtggtatatatgctaaaaaccaagtcattggtgagaattttgtcagtcgctttattaaggtcagtgccatatgtacgaattagcacaacttttggctcagagtctcccctgatttgagctatatatttccttgctaatgccaaaagaatttcaaaatacaagatcttgttggtgattcggttttcacatcatggaaatgtggctattaacaatttgtctagttgttttgaagtgggatgaaaactaaagagtgagtaaccattagagtagcaagccagtgttcccctttgacagtggccattttcacagacatggttcccaaattaagagaaatcaacctagaaaagaattgaatatgacaaaactaaattaatgtttaagacactaataaaattatggaagaatttaagggtagagattagaatcatagataatgcaggaagtaaactattttttatctttaactgaaaaatttagtaatttgtactttaattcatattgttttgaagtttgagctgtgctatttattcctgaaaatttaataactaaatgatttgtgtgttttatttataaatccatatttgatgcatcatgctccttgcacaaagctatcttacatcatcagaaatctgattgattttacaatatatggttctattgtattgtatcatgtttgattgcttgaagccttgaacatgtttttacatttggtatttcaccttttgatttcacaataatgaaatagtttttttctcccagagtttttgaaggcaaagtgcttaatgaactgtgaagttgcattgattcttgagcacaagtatgagcagcttcaacagacatccgatgatcccatgaaccaagtttctcagtgagttcaattccttatcaagttcatggttatttaacacaaagatcctggtataatgttttcggatgctcttggaataattagcttttattacaatttggcttacattaattcctccaagatcttgtcttttattacacagttgaaaatgtcttccattttggtgtcctttaaatgcaattatattaagttataaaacatgtctgcaaacttcctgatcccaattgacattttggcagaattagatttgatattgtcatattgataatgagatggaagaggagcaaaattgttggacatgattcccaccttatagcactgattgtttttctcttcttttttctctctcagggtatttgaaaagtcgctgcagtatgtgaagcgtttcagccgctataaaaatcccgatgctgttagacaagttcgagagtatcctcctaaaataaattgaatagcccgtaacccgtttgtcatttctctttgtccatacatttactttcggttaaattatgttgaattttgatgtaaatgtcctgttcttttataaaaatttacctaagtttctttcatattgttattgactttttattgtctaatttaattttggattttccttcaattaaagtaatatatgtcttttgataaattaaaggaccattgtatcttatttagttctgctgagaaaaattggtctatgttaattcctcttttcctggaaggaaatgctaagaaacctgattttattgccatatttcagaattgtgtgatcttaactgacatacagaattctcgcaagatatcagttggctgagtttgaggtaatacacctacttccttcatgaaatgagttaaggaagcaagtgttcacattttattttgaaaaaagttgagtgagtagtcagttcacacttcacacattacaatatatgattctttgtttaaatgaatctgttgcagttgtgtgttcttggcaacctttgcccagaaactgtggaagaagctattgctatggttccatctatcaaggtaaaaataatttgcttctccctctttttgtattaggtatgtttggttttcttttgggaatgatttccattctctctttgatgcttgttaaaataaactgggaaggaaatagagtatttaataaaagaaaatatgacaagtttttataactttctgctcttctaataactgttaaaattcaattttgacatgcaccagaaagtgtataaaataatttagtttacataacaccccgtagtggagaacgcacaaaaagtaaatgctgataattgaaggatttttgttatgttaaactagagatctcttacttgcatctctccttaaaatcatctcagtaacggttcccttcatttacccccctccccccaacccatgaaacttcggtagcatagttctcgttatttaccctcacaagcttatgtttgccacactgagcatgtttgccatgcgttggttatggtctacgcatgaggtttttttgcgtttgcaggtgaggcaaccagttacttggaatattcatgctgtattgggttctttgaagctgctaagcaagttatattttgcatgatatatctgaatactaaacgtaacagccattaaatcttttacgttaattaatgcatcattttttttgcctgcagtcaagaggacgggctcaggatgatgaagcaatcgagaaaatgttaaatgacctgtcgttgattaagaaatttgaataaatacgtcagagtgcatgatataatgttgttggtaccgtataactgacatatttagttcattttgtgacttttatcgagtaggattttgacacatgcgagctggtgtatgaaagtgcttttgacctgttatgatgattctgcgaatgagataattgtcttactataaccacctatttatagcaagaagatagattattatcctttaagcgatgactgggcaggggtaaaggaaaaaaatttacgtaagctctggttcctacgaatgtttcgcctagcactcgtcgttactcaacaacgtggctttatcaagtgaaaaccatcttacgtatggccattaactagataaccttcaccagtcagcgaagatcagcgtaatataatggtataacaagatagtgcgatgaattaagacagaaaagctataaagtattcaatattgaaaatacattgaatccagaattatgaatttaggattcgacaaaatgaaattaaaagggagtgtaagattgaaccttattgtcattatataaaaaatattgtacaaaatgttgataaacaagttcttgacaatcaattttttgtcactattaataaaaaaaattgattgactaattttaataagattttttaattacattttttttatcaataaatctttaacatgaggccgtaggttacatgtctaacataagttatatgcaaaccaacacaatgttaatagtaaatagctgacaaataatgcaaactagtattttagcatgtgcattctacataataagtgtttattttataccactaaagttataatttacaataaataaatatttctaaatgtataaattatatttaaattaaaatctgaaagaaatatattttaaaataaattatattttagatttatgacaaatagtttatttgtgatatattgttatttttaattattgataatttcttttaaaaaatattcaaattcttgttgaacatgatagattgaaaaagataagaagttgaattgttttctttgatattaaaagtataatatgatatatcttatacatgttaggatcatattttgtttttttaaagtaaaatacatatttgagattggtttataatattcagttatatattgtcaaaccatttaaatgatattaaaatttaaaagtataaggatatatcaaatacatgttaagagtgtgagatccatcacttcatgataaaagagtattcaaatgaaagtgaatgggagagagagtagggagagcgaaagcctgaaaaaataaaaagacttattcctttatataattatatataatatttgtaatttaaaataataaaaaaggatatatctttaaatttttctcttgctaatcgtatttactaacatgacactcaattattaaaattctaagtgtgattttaaattttctattaacttattagagttgacccataaaatctgggcatatataatttttatttgtaagaaaagaaaatatatactacatggtcatgtctcaccacatgtaacaccactccacataatttacatccttaagatagaaacacgaaacagaagaggatgaaaatacttttatttttattttttaatgactcctgatttagatatgatatccatcaaaattgatgattttaataatttttaaccaatcacataaaaagtgttggaaagagaatgttagagaaagtgtcattagctttccttattataagaatacaatgagaatacccacaacccccaaactttgttatacgtgataattacctaaataatgacattttattataaaggaaagatcaatttactccaagaataattctttgagttatttttcatcctcattattcattttcttgaaatctaatgattgtaaaacgtaactaattttaaccattagatttcaaaaaaatcaatgattaggatgaagaataacaaagttactcttagagtaactagattcctcctctttactatatacatacataataataaatacaatcaaaggtagtgaatctacagcctgtagatgaagcttctgccttgttatatacaatatgcgacattagcagtttcaagtatttttacacaatataaggctgtaccatgccagccagccagctcagacctgatcatagatcaaaacttaacagtcataaagacttaatcatcatatttacacgtatttttcaaaactaagaacatattcttcaactggatggaccaatttatctagggggaaagaaggcttaaagcttacatgtgttttactgatttaacatcagcataaacgccatttggcagaagcataagtgtaatatactatatgatatgtactactatatctggtgcttactacctcgcgtaagcaacaagtttttcatttctttgtaaccatggaattcttccaatgcatcagctgttgttttcctagaggctatgaccccagaagacattatgctcacaggccttgatgccttaaggatctgattgggccctcgagtgttattgttccaggtttcagggtgtgaaccttgtgacacgtgttgtgaggtggagaaatcttgacgtagaggtggtgcttttttcagcatatgtacaagcgcaccaacagcagcatcttgagactttctaatgggaaagaatcctccagcttcaagcgtctcagttatatgaccatgatcaagatattcagttctggttatacacaaggaatcatgttacaattgctaaattaaaacagtctagcaaatttatgtcatctataacttatagaaaaaggaaaaaaataaccagattatatgttgttttctttgaagtttgactcagtatagagaaattatacatgaatttgtaataagcacaaggatctaggtgaagttgtgaattgactcacaaacctgaaagtagacccctatcttgatggataacaagttaacagctattcaaaattaaaattaagatgaaaaatgtgttctgccagtcggatcaatcaaataaaatatagcacaagaggaaacagttgatagatttacaagagtgagtgactaaattacatcaagtcaggatgttctacaaaaattgcaaacagcctactttatctagcaaattctttttcaagcatgcaacactagacaccagatctacaaactaattcttactataaataataaatgaaaccaatataatctgaaatcaagatgctttttctactcagatacaaaaaaccaccacgtctttgccttcagtcatcagactgcaataccagatttccatgccctcacggatgcacccaaagttggcagcaggatactatggcccctacttggtgttaaagcaaattggggcttttgcttttcagttgcaacctccagagcttgcccaaatccatccagtgtttcatgtttcccagcttaaaaaaacagtagggaaacactcaattgaagctaatccacctacagaattggaagtgtaaccctagcatatctccagcaggtatcttggagtataaaaccatcatacgccatggggtccaagtactgcaagttctcactcattggcagggtcagccagctgaggaagcaacatgggaagatgtggtggcaatcaaatggcactttctaaccttcaaccttaaggacaaggttgacattttaggcgaatgtattgttgggaaaggaaataatgagccaaaacagagaacatggaaagtgtatactagaaggaacaaagtgaataagtagatttagttagccagttaaaggggtgtataacagaaattgtgtaagtggaaggcgactttttgggaggattagaataccgagcaactactctggtataaagggaagactctttggagtaggttaactccttgaatctgcattaaataataacagaagcctttttcaattctttcactttcttttgtctctactctcctattgaactgataaactcagttcttacatcctacttccatggatgacatgaggatgatccccaaaaccatggcctccaatccagtgcagaatgctcctatcttcaaggatgtttctccacctcttaacatgtcatggaccatgttgtgttggtgacctctctttggtattctcccttggctatttcaaaggaacttctatttgaagtttcaactatgcaaaaagagattgggcaacatagcagaactcttggatttctcatattcactctggtatattttctttttctttcttggaggatattttatagcttgtttggttttagaaaacattttctattttcacttcataatttcacaagtaattgacaaaatgtcaccttatgttcattttatttcttgttttcagacacagacttatataggaaaagtgaaacaacaagatattgttttcactatatccagtacaagtctttgaaaacagaaatcaaatgaaaataagtaaatatttgtgaaaataggaaatgtaaatataataaaaatcctcttttctttcaaaattctgtttcttctagaaaattaaaataacttaccatattattaattggtaccgaaatctaatcacaaactaaacacacacccctggccccttcccaaaatgactgactccctactatcaacctggcagtcgaattatccttggattagaagccaatatgctagctctccatacaataaaaatctctagtcattttacataatagattggtcatatatttgaatcaatggtatgacagcactgatgttcctgaaggaaaacacacacccctctccactgacaaagaactgcggatcccttattacaatcaaataacagttaggatacatatgatcctgatgatcctggtattttgtctatttagccctctatcatccgactgaattttgagacataactagctgaactggatcatatttttgccagccagaaaatcaatagaactatagaagggagaacatgatgggagggtgcaacagtaaacagattaatgttgattgtttaagtgccatactataagacatggttaaagaagaaaaagtcaggaccagcagattcattcactgcaaatatgccacatcaataacttatttttggaaagtatagcattaaataccaataaaatacactttcaaagatggggtaaaataaaattagaaattaatagtgagtctaaaccatttcaatagtatagtcatttgcatacacatgataaacatttacacaattttgaggagcaattgtgaggccaaaaataatttgaagaaaagaagaatatgcaaaactttcaccaaaatataggtgaagccaaatatttatgcatatcaaaagtaagtgtgtttaccaattaatgtctagatgctaatctctaaagtggaaaagaaggaaaagttataaacactgtgttttgatactacttgtcaaaaactgtgcacaaaacagaaataatgaaattaaaaccctagagcttatttcttattttgcttctattttttaacctgttagtcaattttttgttccatttctagataaagtgttacacataacttgaagcgcaatcctcccagaacccccaagtgtattaacctagactttcccagaccagaaacaggaaatcccagtgggatggaagtgctcctgttcctggaacctgttcaacctgcttacccccattatggatttagattgtctcctatttctgaattaaaaaatatggtcaaagagaaaggcacattttaatgcaaggacccaccatgatatattgtaagatcaacaagtcatattcataaagattgttattctctctccagcaagaccatattctgttattagcatatctagcttatatagtattcttatgtaaaaattagcatataagcaaaacataaatgcaagtgaatttcagttatgaagtacctgcttcctggatctgtcatatcatcatcatccacatcaaatggacaagtaaaatcagtatcatcaaaatcatcctgataagacctactggagcttctggaaattgaaatctggggcgagctgttagcagatatcttgaccccagaatattttcgagactcatcttttccaagagaaaacaactgcagaaagtggaagacacccttaacaaatcaaatatactttgaactatggaaaaaagtacattgtggttagcacacacacagcataccttctcagctgttgttcctgtttgcattgagcttctatcaatcttagcagtgccccttgaacctcttaggggaagagatggaggcaaattatgcctattggagtatccaggggaattagcaatttcagcagtaggtatgctgactggagcactttcagatcgtaaaagtggtttgcatggaaatggcgcagaattagaggttgaaggtgatgcagagggataataatcctcaaagtttgtattcttcttctgaatcatagacatctcagttggatgaggaggcaaacttgaaggggggaaacgctgcaaacttgcattatacactgatgagtgtgattctgaatgagtaggcgaaggtaaataagaaggaggtgaggctctataatgatcgaaactccaactacgctgccttgaagatggcaacgatgatggagagccatgtgatggcaatcctgcctcgggatgagaaggaaacctccttaatggatcagccaatggactcccaacatagtcagttataacttgtggggacattggtgtcgaaggttcagagctcacatctgaggctgaggggcaatacatcacactaagacacagcctaccagaagaagtatccacaggggtgaacccgaatttcgtcatttcagcctcttctttccgggtgaagggctcaacaaaagaagacacacggtgagcaagggtgaagtccctaatctgtccagacgaactaagctctctgaaaagtttataggcaggtaaaagtctaacagtgacatacaaagaccttagaagcaaagttgatttcttatacaagttatgcaaagaaacattgcttgacctcctactgccagaattagaatcccttgtcttcctactctcatactgcacaacccacctctccacaatcttttcagtccttcccacaacccccaattcttcctgatcagtgttccagccaaaagggcatctttccttcagtgaagaactcctaggaagaacccgtttgggagaaaaactcacagtcacagggtcccaatccggaggcctctgcaccaaaatcacatcaatcactatgcactcaagattgttctggcgccagaggtcaatgttctccaacgccgcggggcactcccggagtgccaaattgaaccacttatccctcggccgcacacttgatgaagacgaagacgacgaacacggtgacgaaacaacttgatcacaataggaattgcgggaggacgcatagagtgcccttgattcaagtattatgtgaaggctcttcgcgaagaactcggtgattatttgttccatcttcgcagcatccgaatgtgcattaccatgagacgatgccattactttcaggtgtcaacacaacacaaccctcagaaacaaacaaaaaggtccaattttcaccgttagcttagacccccaactgcagtgcgtttcaggtttcactacatcaacatcacacacaacaacttcggaattcaaatgcaaccgaatcatccatcaactccattactaataatactaggttgtttaaaaagaacacgacaacaacaacaacgtaaaagggtgttcgattcttccctatatttgaagaattcgatagcatcacaagtggggggaaattgtgtggaagagagtgagaaaaagagagagattagtgtgcttacctgtgcatgtgagaaagggttggatgatagggagtgattgaaagggttgatgtggggatcttatcctatcacttagaaccttgatgatttctgttcagtttctgttatgtgagtttacacgaaacgaaatattatgaatgaagagtgttgagagaagcaaagcaaagaaagtaggactggctgaggagtggaagagtgggaccctttggcagaggccgttgttggctaaacccggataggagtcatcccggattggtttgaatcgattttggttaaatttaggatccagttcaattaaatttgatcggttcaatttttagaagaaaaataattgaaatttaatcaaatcattcataaacaattgagttcgaatcaccgggttacccatttaatttttttaataactattattttatatcacgattctttcaaatatctcatacaattaacacaatattatcaaatgtatggaagtagtaaaattgattcattaaataccatcaatataatattataaaataaacttataatataaattatttgtgaacaatattgattataatagtctaaatcacaattgtttcttacaaatcaagctttgttataatcaattttgttgcaaccatatttgctgaaacaaacaaataaacaaaatatgattcattaatattataaatatgataaacaaaatatgaaaaaaaaaatgtgaactaaataacaatatacctgaaagtaatacattaagaagtttcagcacttgcagtttcaatacttggagacccaataaaagaatagactgatatccttgtttcccagctacccttacacaacaattatctcagctgatatccttgtttccccaaaaaagctcttgtctcaattcaccaagaatagagataaattgatatccttgttttccaaccagacttgtatcctagtttgccaaccagaagtcgcatgtctcaatttatcaagaattgagacaaaactggtatcctagttcccagccgtgaccttttccaaattcaagaagaagaatacaataaaataattacatttacgcgtatattccttaaacaaatacgtacctttaaatcctgactgagagttgaagaatcaaacttgtcaaacgcttttatacgatctcacaataattcattcaatgatgcaaacataaactctctaatactttaatattatttggaatggaatgcatacatgaacaccaaaatatatttctatttatactaatttaaagatatgattttaaccaatttttgaatgcaatcctaaatatattctatcatattatccaatgcaatcttaaagatattctattatattatgcaatgcaatcttaaaaatattttatcctattttttaatgcaatattaaaaaatatcctatcttatttttgaatgcaatcttaaacatttacaatatcatacatttttttattgtcaaattatttttaatatatatatataaaataaaatttatattatcattacgggttcacggatcgggtcatcggatcaacggatctgtaaatctaaacccgtaactcaacccgcacatgaacggttcggatcggttttgacccaaatatataaatgacccaattcaaactgttcagatcagttcgggttcacgagtgactcatacccgtgaacacccataaacccggatacatagcatgattgaaataccccatcattttaaatatcaaaatcctatgatatgatctactatttctatttgatatattatctttatcgccatttaatctcaaaattttaaaaattgtttattttaatactctttttgtttgaattaagagtgaaattaagaaaaagaaaaataggttagaaataaaggaaaaatatattacttcaatgaaaataaatacaaaatagaaggaggggagaaatttctccacctttagttggacggacaaaaaagagagtgaaaataaatttgataaaaaaatattttcatagtactaattaaaagaatattatttttaacataaaatatttattattttaaaaaataaatttaaatatttttagtccttataaaatgaacaaatttttattttggtccatgtaaaaaatttgtttttgttttttattcttctaaaatttgaaattgttatttttttattcctttaaaataagtaaaaatttgttttggtcgtgtaaaataatttttttaattatcatcatttcaaaatttgaaaccactggttttagtcctaaattaatttattaacaaaaaataggtctattcttctagtatcaattttatcataaatgatttttcatctttgaatctttgaaaaaaaatcaaattttatgataatttttttgttttgttttgtaaatgataaataattttatgagtaaaaaatatattttgtttcatctatgaatcttcgaagaaatcaattttttggaatgattcttcagtcttttgaattgaaacaatatgtttatatttttaagaaattatataaaagaaaatcgtatctataattttgtctagggttcataaaacgttaaagcattccaaaaagggattatccgccctacacttttatgcgaatttgtgcgaatgtcaaatggattgtactctgattccccgaatgcataatacttcacttttccctgccatgccgtatggcccgtatcccatttatcatcccacagcattggagtacgtcacaaatcacaaacactacaatttatcaacccaattccatactccttactgttgttgacctttcatattaattcattttgtatagtgagatgccaacagcaatattaacaatatctatgatctaaattaattagatttagtgataaataaacctaataataaatataaagaaattgaaataattaaaaaaaaggagaaataagacaagataaaaaaaaaataagataaaagataagaatgatgaaaaaagtagaggaaaagtgaagaaaaaaataactagcaccatctggaatatagaaataataagtgcctaaccctccaccaaacttataatttttcttcattctgtcttaagacatatttttcgccactctatatatggtttatctctacttctgtgttgaacttttggtaatagactcttatttttacaaaagcaatcagggactgtctcattacgtgtctaaatcacttcaatctatgcttcctcatcttttcactcaccgatactactgatacctttcgtcgaatattttcatttcttatcttatctatcttcgtataatcacacattcaccttaacatcctaatttttgttacccctattttatgtttatgttgtctatgtgttgaccaatatttagttccataacattataggtcttacagatgttctataaaatttttcttttaatttaaggaaaattttgcggtcacacaaaaattcagatgcacttcgacatttcatctgatctgattttataattttcatcattatcaataactccaccttttttgcaaaattaatcccaaatatttaaaaacatatttttttatacctattgaccaagtagatgcacaggttttgattatcatcttttactagtaaaaactcacactttatgtattcagtcttcctctaacttatcatgaattctttgtactataaagtgtttctccacaattcaagattcctaataatatcattttttatctcattaataagtataatatcatatataaacaacatagagtataacacttcctcttaaatatcttttgatttcaataaaaataaattcatatgaccaaagactatgaactatgaaaccaatatcggatttggattccgtgaaaaaacaacatatcggatttggatacgatgcaaaagcaaaaaatgcctccgggctcgatactgtaatttgggcccaaattcctatgttatttcctgcacttcctttttccttttggaatgtccatcctagaatgtaataacattctgaaatgcacttgcttttttatttttggaataacaattccataaaaaaaaaaaaacattctgaaaagagtacaaaaaacaacatgggattgcagaatgtaataacccatttacaaaattttcaagctgcagaattttaagacttgtgataagagaagaaaaaaaacttttttctccactttttattcttatatctatatttagggatagaatgggttgatacttataccaaatgtcatccttaatttcattgaattttatagttaaaattattccacataaaaacttttaaaacaatattgactaaagatgtcacatgagaattttatatgcattatatattttatgttgtttggaagttactattttgggagtcgctacttcagttgtggtcttgttctctgatgtcttagtttcatgtttggagtgatttttgttttcattacagtattcagatgaagttttgtttgttttaagctaaaaaccttaataacaccccgtccttaagtttagttccattttactcttaacaattgatttggcttgccgaaacaaaaacttgatcgtttcctgaacactatcttgtccccacgtgtgcacacaatctgataaggtaaaggcttacttttgagtccctaacctctcttatctggtgctgattttcttttagatgggcttggtccattttttattttcctgaatgtttcttttctttttcttgttgggcctggctcatttgtctttttccttctgtttttctctctttttttaaatttgccgggcttcacccccttttttttcttgttagacttttgctaaattcacgtcccttattgctaagtacacttccctttttatttttggcatttcccccctcaaaaatactcttttcaggaatgtgtttaacacttccgaaaatgaatttacggatgctaaagttaaagctttgatctctgtatgttagtgtaccccaaagtatttaatcaatgccagaggagaagccattggcttagagagctagaggaattccaaagcgaaaaataggaccgtccacctcgccactctctttttctacataaaccgattagtagcactttactttgcagttccagaatcaaccaaggcctcagctatgtaagaaattatttcaaattgctatatggcacattctcctgcaattatttacaaacccattcacaacatcattaaagcccctgagaaatttgatttcaatagcatcttggtaattatgatacattgattagaacatgcttgaattttagttagaatatgaattattaatcaatcaacttctactagaccacacatacatagtcaataattcaaatatacacgaaataaaagattgacatggtgataaaggaacaaagaaagagaggagacgtcgtgaatttaaatcttttcggtaacaaaaaaaccaacaattaatcactaatatttgtttataaaaaaaataattcaaatacataatacgttgattctacataccaagtacgttagggtcatacctgcaaagtctagggtgaaattggaaatttctaatatgtaatatgtaaaaggatcaaaatttagtattcaaattgctccatcattttgggaaatcattattcttttctctcacatcaggacattcaattgtaaatattgtaaatttgtaatatgtaaaggacaaaaatttagtgtttttcaagaacttcttccaattataatttcttattagagatatgacgtctcgtaaaaagaagaccaaaacttagtgttattcaaaaaccttctccaattataaattcttatcaaagagacatggtgtttgataagaaaataactaaaatttagtgttttccaagacccccttcaaacataaattcttattaagatgtggtgcttgataagaatattttattttggcaaccttgatggagatattctaacggagtagattggtttgtcattggaatctatgtacgagattacaagtctttttcgggataaaaagtatatcatactacttgcatcagttgcatgtataatattagtgtctattgtaccgcaatatattaactccgtgattatgtgcagcttatgtcatctattaaggtttgagaacacattgtaaattcacataaactgagtatcttttaagataagaatgcaaaatgatatgttccttatggatatagccatgaggcatccacgtgtctatgcatcttcaaattcacttttgttcaagagatgcacagtgcatgagaataattattaaacaagtgaaagtccttgtaggtcttaatctacgtatcgtaaaataaaataataattaagttttttaataatatttgatgttttttaaaaagtttaacttttagcttttaattttgtataatttttattttaatatgttattcatttttttatcaacttttaaataaattattattttattattttatatttatcagttattttaacaattatttttatcaaatatttataatttaataaattaattattcaatttttaactaactttttaaactaattttatgcaacatgatctagacatacatgcatcaagtggggcgacctaataatgaccaacatcaatgaccaaaccacagaaacaaaaagaagaacagcaacctagcaaaagccaaaaagcgaattgaaatactaattcaatactcaaaagagctctagaaaaaacaaataagatcttgggacgatataatttaattccgtttgcattaacaaccggccagaatattatatgtcctgttaacatcacacatactttgcaattttaatgttactacggcctagactgatcaatatatgggaggattcacttacattaattttttacgatatttttttttatatatttatatgactcattattaattaattattcaaatatacaagttgaaaaaatcattcaatactataattttaatatgtgaatacaattaattataaaaaaattatgtgactataaatgtatgtgtgattttttaatcaatgtaaaatattcattaatttttattaaaatttaatctatcatctttttaattatattttttatttataacatttaaatttaaaatcttatttagatttatacattcgcgaatagttgttaaaattaatatggcttggtcagttgggtcgagacccaataatataattgatatgatcaaacttgactggtcatattatgctaatccaaccgagttcattttttttatatattttttgtagatttttttaaaaaaatttaaattgttattaataattattttaaattttggactataaataatttttttaataaaataatattaattatacacttatatattttatatataatagatatataattttaaatttttaatatatataaatcaaatcacctattattaatccatttattagattagattattgacgcattatccactgtctgaatcggataaatagtagccgattttaataacattatacaagctttacaatggcacactgtttagtgttcaatggagaaaaataaagacgatcgattaatgagatcagcaattagtcatgattacttatgaaattacgtttatgcagctcctagccgcaattgctaactgtagattaatgcatctataacaaattaagcaccctttcagtctgtcacttgttaaatcaaccgcttgtgagtgtgaccgaatcgtgatgaagaggatgattcccatgaacaaatccaatacataatcacactcaatcttttcatatataataaattaaaatatgtattctctatttttaagtcgcataattatttttattaaaaatcatgtttttctactttttatatttaattggctctaaatttttctattttttcaccttattattagttttataaaatatatttaaacaacttcaatattagctagattcactgttttgtacgaagagatttgtatgaaaagtataaattgctcgttcgatcatggtaaattgaagtaagaaaatcacacacacacaatatatatatatatatatatatatatatatatatatattattaataaaataaatcatgtgaaattttgccacttcataattcgcttttttaattatttatcttttctattttcaaattttgttttcctagtaattcatattttataatattctctatgtttatatgattaggcaatattttacttaattttttaaagtttttttaacttcaaaataaaggttttcatggaagatcgtccatcttctcaatttttgttcattaaaataattacttttaattttattttttatacgttttaaatgttcttggcttgactacttattctaaatagaataggaagtccaaaagaattgggttaaatactattttaatcaaaaaaatcataaataagactcttgctatattattattcgtattaagtgtctcaatatatttagttggatgaatacactcttaaagatggtttaatgtttgcttataaaaaaatggcttaatcttttttgtctactctcatcaaaattattgttttctttttaaatttatctaaattcttatatatatatatatattataaagaaacattaaagatattttaattaatttttaattttactagttgaaatacttatttgatgaggtaaacaagttttttaaatattttttttaaatactaactgaaacaacattttttaaaatgctaatttctatttttaattttttttatcatgaatatatttatctaattttttaattatcctttttaaataaattataattttattaattttttattacttataacttttaactactttaataatcaaatgattataatttaataagttaaaattttcaattttcaaactagttttacactacataggcaaaattagaaaagataagctagcttgctaaaaatcggcatgacgctttctaaacctagcctactctaacgacgctctctaaacctaggcggcgttagagattcgtttcttatgtcactaaatcgaatattaatttggaacatcatgcaggaagcctccttgaattatgtggaactcctggaattacgatggactagcaagttgcacctgctagtcctagttcatatacgtggttaagaggattttgcacttggaaattccaattgatacatacctcaatgtcaattttgatggaaggcttttgggacccaaaggcaattctctaaaaggggtataagcttctacaggttgtcgtgagtatattagggaaaatggttcaataaaagatccatacaaggaagaaaattaagagtaagaccagtctatcagcatctcaatgagcaactccacatcttgattgagactgatttacctgttaatatttttgacataaggctctagcaagctcaggaaattatagaataactgatcaaaaccgtggaagagtctgacgactatattaagagacaacagttgcgtgtgaactggcgatgctaaattcaaattctagataagagagtcctcgaccaagagaaagtgtatctccattcaattccagtggaatgaaacgaactaaaactggctgatgaaaggtttccttgttacttgtagatggttgttattgttttggagctatctcaataaagcatctatgaacgatcgaataggttaacagttattgttggctcacattctggtggttttaatcctccctttatcctacatttttcttctaaaacaacatgagttaaagctaaaaaaattttagaaaaaaaatgataaaatattttggtattgagaataagtgtgttcaaatgagtatttttcttgcacactttgtatatttattgttgatttattcttgcgtccgtaatttgtgagaaacatgaggcggaccgaagtagtagagaagggggcaagtgcccccccttgaatttgtccatgaaattactcatatacctttcatttttattattttctccaaaatatcctaggtcttaaaatttgagagtagtttttaatttctcttttcttctctcattttgctttcaccttcatgttctgctctccctgcaagacaatgtatgtattgattatattgcccaaaattctggccccttaaattttgccattaaaattttaatatatccttagcacttgtctacaatactttttaattatttccagtgcttattatatagtttgcagtacttattaattattttcatttgtaattcatgcattagcacttgtttataaggtgattaaagtctttactctttattgaaatgagaagtacaatttaaccatatgcattttatagatatattttaatctatattgtaacatctcatattcaaagatctcaaactcaatacttatatctaaactaattctcatgttatcatcatagtcttttgaaatctcattgtaagtcacaataaatttatttcattgttctattcaatctagaataataatttggtctggctatttgtttgtttttttagattatggtttaaaattgtttgttcatttaaattttctttacaaaaaaaaatttgggggctgtacggacatagatgaattttcttggatttgctactagtgcctccccttgattatttttctagattcgccactcaatatacatgtgatgatgggagaagctttaggtcttaagtggataagttttgtggtctcatcggtgctcaaagattagttataggataggttgaattctttttagttgtttgtctcaaacatgtattttattcattatgttataggttgacaataaaaaaaatgtatacacactgaatgactcatctagaaatttgatgatgtggagtcaatataatatatccgtgcaaacacgtatacacatgcgtggacacacccactttttttatataattatttaaatataataaattacacttttagactctattatttgttaaattttaattttggtctctttaattttgtgtaaatttattctctttacttttaattgtgtaattttagttaatttattaactttaattatttgcacatcattgattttaattattatgtacttgtacttgtagtgattgatttaattcattgattttgttcaacatgtgctctgattatcatgacctggctatatatagctagacatagacatggttaactacaatttggatccaatgccattacacttaaaataggagtaaagtagtccccggttgaatcttgtacgtggtctcacaattaggacactgataagtttcgcaccattgtcaacacacgggggattgagattgatgtacaacacttattgcatcctcaacccacggggggattgagactagtgtacaacacccaccgctgcctaccatcatcaacttatggggattaagattaatgtacgacactcatcgtgtgtatatatgtgtgtctatatatacagagagcattttatttgagaatgaaaatactaatattaactatcaagattaaaatattttaaatttaaaataaaatttcatttaactataaaaattttataagatttattaaacataaaaatcaaatatcttaaagatttaatcgcgtcctaaaatatttcaaacatattatcatcatgaatatttttgtcattattgtcatcaccattatcatcgtgttcgttatcatgatcattatcattaccaccaacataatcgttattgttgccgctgccaacaccaccggtagtggtgatgacgattttaacataaattaaatttttaagatatttgattttttgttttataaattttatggttaaataagttcttagtttaaattaaaaatattttaatctaacaattgagattaattattctcattctcacataagataattattctaatatgtctcctctcactctatatatatgagaagggatccacttattgcaaaaataattattttagagttattcatcaccatgtttaccatttattttctaaaaaaatatggctgccattgaaacgtccatttcattcaatacgtcccctttttttcatttcacctttgctaatgtagttattttcatttaactccaccaatcttttttctccaaactatcatttgaggtgaaacttgacaccgatgtctatatgtattgttgtcatttatacatatctgtaaataatttttatgtttgggcatgcggaaataattgtttaattgacgctattcctccaattactacactaaaattgataggcattcattgttccatctgggtattagggcatgtaaatgaaatataacacttcagccatacatctcattggaggagtcattgtgtcctccaacacggaggaagttgtaagtcgtttttccattcgcctcttgaagatctccatgttttgcaaagtaaaagacagaagagttcattcatggagagaggaaagataattttggattacttgtatcattaaaagaaattaaaattacagaaatacccattgattcatgttaatatatataaaaaatagtcttttgtctaatgcaaaaggtgttcaatgttgtactcctcaatacttttggtcgtatataagtcaatcgaaactcacaaattagtttattcgtgtttatgtacttgagactgtgagactgtatatcccctacactttcaattgtatatgagtagattgagagttatacattagtctcttcatgcttatgcattcaagaccctgagattgtgtctgtgtatacctcgatactctcgatcatatatgagtcaattgagactaaaggactatgcacccctttaatcgctccatcggtcaactcatattttaatgctaatctttgatatacgattgaggtcatgacaccatcttttaggcattcattagccatgtcatgtgacacgattcttagcctttgagtaaccctaacagtttaaatgagacatgcctgggagtcttagaagggggatgaattttgataagatggacctttttaggaatattagattggttagacacttgagttagagaataattcagttatatttgacacttgaatgatcttgaattaggtctcattcccggaccgagttacaaaaacaaatgctaacatatatcttttatttatttaagtaggtttatgttaacaaatctcatatatatatataatatgaattaattttaacattatatattccgattttctcaaacccacataaagggtggatgcaaccaagtaccaatctacaagtcaatcctcgatgaagacatagcatgtgcatgctcatcaatttgttcattattattggacaacaacatggacgcaagataatccaatatcctgttaatatgttatgcatagttgttattatgcatatatatgtgctcctcattcctcgaaagaccagtgtctctgtcggtaattttcttctctctccgttggtgtgggaccagagaaacaataacagtagtgagatccaacccaccaagatacggatccaagtagtggtacttctagtactgccagagcaaaaagcaaaagcattgcctttaaaaatggccaagcccaatagcttctcttccatggttacttactgtacacgacttaatcacttcaattattattatacaaagctaagttaattaaaaagcgaaaaagaacccctctccacttgtctcctcgtacattacttcattaattttataatatcccagcccttaatcaagcactttccgcgtaaaaagtacagctgtagacagataaaaaatcggattggagatcaaatttagcttaaacattttgccaatttgatcatttgttatcattaacaacgctgctttaattaggagccacaactcgttaaatccatgagattgcgatctatctgcttgcatcgcgtgaagattgtaaaacaaattcacaaatagcggaaaagattagggtccattttctatccaaacatatattatgatttgacaagagaataattaacatattgcaaacatcgtgcaatagtgtacaaggaaagaagacatatcatacataacgagataagagctatacaagagttcgttgtggcctacatgtggagttatatatagtttttggaaatttaataaccaacaaaataaactttcagcgagttagttgctggttcaaagttttaactgtatgtatattattgactggaaatagaaacttttactctccacacccaactcccttgtcctataatgtttgtctagctataacatacttttaaaacctagatgaatgattatccttctttttgggtctttagatattagccgattttttgcatctttggtgaaaagccagttatcacttgtgatatcaaaaaagaaaagccagttaccacttcagcttttacgtactgaagtgaattttacttgactcatcaagcatatgggtttgatatttacctatttatttaattgacaccaaaatagtgaatgtatatttagaagtagaattaaatgtaacaattttcaatcacagaaattatttaatggctacatatagtaaagatattttatttgaaaccattcgcattcaaatacaaacatatataagctacctaaccagctaacattatgattcaaaatgttggggggaaagtagcattattctttgataaaatttaaatgccacttgtgacatcactatctgtcgtgtaaagaggtgttagaaaacaatataacagcatcaactttcattaaatagtttaaattctgtaccaaagagaattccttaattttgaagaaaaaaatgttataatatttcaattataattttatttttatttagttttatgttttttagataaaaaaattcaagtggtccgtgcaatttttttttaaaaaaaattacaatcagtattataattcatcattttttttaaatatctctatatagttaccctttaaaatgtatttctttatatattatttaactaattcaaaaatattaaaatatatccctctttatgaaatatgataagttttaaattctttcacaattattattactgggtgtttgtccacttttcgaatgtaaaattgattctcatttaaaagtaataagagtttgtagtcacctaaacatgcttttcatgtaacaataataatcaatcaatcaatttgttggttcctctggtgaagaagttgggttaaatttcctctttaaaataaaaaaggaaatctttttttttattttggctctttctatcctctttcaatcccctccacgcatcgataggccccgtctcattgagtgagtgttttttgtgtacattcattgagtgagtatagtgtcgagtgtcgacactacacagtaacccgacattaatttttgccctaaacagtggagggctgtatataaacgttgtgtatcctaatcatatccaaaaagaatcttattttaattattgaaaatcatatatataacactttgtaattagttaatcataataattaatatatatgaaattaaactctaattttttctatcaaattctgaacctcaacgtatggcattggaagataaccatgttgcgtcttgttcaacaaaaggaatttggcggtttaccaaaaacaaaaaccatttcctgaactttttcatgtgagccaatacggatgaggccacttagttccactttttatcatagggacccaaattaagatgggacaataattgaatcaaccatgaaactatatttcaactcatacatacccttcaggaagcttcacaattccttcacaggctcacggtgtcttcaattacctagttaggagtaacagctgccacgttgacacatggcaaatcctgcttcgtgtaaagtggaaataaaaatggacccatcataatagccaaattgatatacaaaaggctttgtcagtggatgttccatatcatatcatatgctttctttctaatctatatatctctaacaaccaagataaaaagttaaatttccaatccttgccaaaactcccttaggaatattctaacaaaccaaccactcaccaaacaacaataatagtttcatattctaattaaagctagctagctagatatatcatatcataccctactatgttaacttaccctatatatataaatggcctatggcctaatagataaccaacctcaaagctctatctaactcttgttcaatattcccatcatcaaacatgtatgcttcaagttcctttacttcacaactagtccatgaccttctcgtggacacaaactcaagaaagctactccttcaagacccacttcttcaccaatcaatgaactcagccaactccccagataccatgagttacaacacaacagactcatacttcaaaggtcgtgacttcgatgcaaatgttgtcatgatactctcagtgctgctatgtgctgttatttgctcactcgggttgaactccatcataaagtgtgtcttgaggtgttcaaacatagtcatcaacaataatgacccttcttcttcttcaagtagtgcgagctacaacccttcaccaagattggccaacagaggaatcaagaagaaagccctcaagatttttcctactgtgagctactcaacagagattaaactccccggtttggacacagagtgtgtgatatgcctctcggagtttgccaatggtgataaggttcgcattttgccaaaatgcaaccatggtttccacgtttgctgcattgataagtggctaagttcacactcatcatgcccaaagtgcagacagtgcctcattgagacttgcaagaaaattgttggatcccaaattcaaccagtggcaccagtgccagaaacaattataaggattcaaccactagaacctgaaggtttggagcgtaactatagggaagtatgctagctaattactttaattaattagtactagaatgtaatataaaccaatcaactataaacaatgcggtggctattggagaattttcagttgcctattgttttgacctcaaatgtaagataaactagttcaatttttgtaactgcaatattattcttttcaacaatattctaaagttatcaattgaaccagggctttagtgtgtcgtgtcttcgtgaagtttaacttagtaaaagatatatccagatgaagatgcaagtgaattatttcggaacaagagataagggcaaagcaaactatatgtctatttttggtggtcgccaacttgtgaatatcattattatttccacttaattattatttttaaccttataactaaggtgaccactttgaatgaaacaaactaagcactctttcttactccgaagttcactaagaatttgcttaatccaagtaagttaaggtacgcggcatacccgataagagtaatttaataatattttgcacactttaaaacttgtattactcctccaccacttcatttttatataatcaaataacaaaaataggcatttcatcacttatagtactctctctctcattagaaaatagtgggtaatataagtattttaatgtgtaaatgtcatttgtgtttgataataacctactccaacagtctttcaaaagagagtaaacaaactggtagtactgttttatctatcttgcaagtaagagataaatacaacacccccaccccccgcccctggtgcccctaaaaaataattaaataaaattctagtgtgtcattattgtatcaaagggtttgaagtttatatagaaccgtgttagaacatcaggaatatgtatgtccacaaaagttgtaggacaatgaattcaaattaagattaacatcgagcacacaaacacaacaaaataattatggtttgtggcattgctgctcacattatgctttaaatatttgtgagatcgatcgattgatataactttagttcttctcaattagcggaattggtgattgaattgatgaacaaagttaataataaagaacaatcctataagatacataattaatcacttcgattcagattataaatcaaatgctggcaaaaaaacgccacaagtgaataataatttcgttatatatatgtttgaacggcccctagattgctataataactagactccaagtttaaaagaaaggaaaagaaaaactacaaagtgggtgtactttatccagtcaatggagcatatatataatgaatggaagctgaggcagaaatcactaatcaacttccaatcaaagaaatgtaccaaaagggaaatgttgtaacatagaactcacacataggcatagtgtataattccctacactaaactaactaaatatatattctgggcggctgaactttgttttgctagagtgagaaatatttaggtgcatttgaagcaagacattttcttactctgattcattcattatttgctatatcagtaatctacataggaaaaataaaaattgtcattaatctacatagaaaaattaaaaattatcattaatgtaggaaacaacaatgatccacaatgctaacatgacgaacaataaataaatcagaacaacaaaaatatcttacttcaagtgcacctaagaatttctatactagagtttcacgtattatataagttctgattgcggcaaaatatggtaaatgtatgtgcgtgggacactgaaagctaggcgaagcagattattatggcgttaataaattaaagcaactggatagtattattgttaggaattgtaagaacaaatcagagggtaagaaagccagaaaacagggtaagctatagatacagtatataaattaacgcataatggaagagagagacggggaaaagcaagtccaacattaaatatgccaataattcacacctgaaatcattttcttccgttacaaacaatagatccgtatgcaattaattgagttctgggttaaattagccaatttggaaaatgcagggtatgcttgaataacataaattcttttttataaaaatcaaatttgaatattattccaacaatttaatattaattttaatacattaattacttaattaacataacataaactcttataaccaaagaagttaagaaggaaagataaatagtttttttataaactaaaattaacttatacataagattaaaatattttctctgaacttttgtttacggcatattttctcagaacttgaatataagcaaacaaatataatttcatcccaattaaggttgttagttaaattcatttgattttcttgattttacataaaaaaaatactgaaatatgtatgtgatccctaataaataatcaaactttatttttacttcctaatatttttttttcatttttgttttctaataaaacaataattttatttttgattcttagaatttttttagtgcttaataaattaatgaattttgtatttgattcctgataaaattttttttattattagtctcttgaaaaaactaataacaaatgattttttttaatagggagtaaacacaaaattgcaaatttaacggggattaaaaaatgtcaggaatcaaaaataaaattgttgttttgttaagaacttaatagaaagaaaaaaaaatattatgaaataaacacaaaatttaaatatttatcaaggatcacaattatattttaacaaaaaaatatatctcctaagctaccttaatcatatttattagagattatgcaaacatttgaattaacttaagagtatttttgaaataatgatattaattagatttcaattaattaaaatttgtttatacatcaaattagcttgagcattttctcatttatgtttgagttaaagaaaaataatacaaaaagacaccccccctccaaaaaaatcgaaacatctatatttaataataattacacgtcaaaacctcctcattacttttgtacttaattttttcagttaaaaatgtttatttatatttatgtatgtatccaacttgattctacaacatctttaatgataaatttcaaattgagatctaagattattttttggtaaatttgatagtgccacataggataaagatctctttcattttttctttaatggtagatctcattttgagatcttagggagagagaaaaaaaaaagaaaatttattcttttttgaataatgtatagatcttaagagatttttttatcagaactcatccttcatgttggagatctctttaacttttttattgtgagatataataaaaattatatcttgaactcaaaattcttactcaagattttacactaaaatttatgcaaacgacaaagtaatcagggatagataaattaattggttaaaagcacaatgcatttaatttaaattaaataaaagggtctgaatatactttaactttttgctttttgaaatagatatagttcaggattatgtttccttttttacattgttttatttcactttatacgggaaatcctaatcattaggggtgaaaatattttatttatagcctaatgttatatgagtattgatatcctaattagcattagacttaatttgatgtaaggttatttattaaatatatattatttaaaggtttaactcaataaatatagtttagttgacaatatataaaatacattattgaaaatagatgataaatattaagtgtgactaaatcttgttgtttataaaagaaagtctgatgacatttgaatattattataaatttaatgatataattatctgttggtaaaaaaaaatctgatggtatatataagggttgaagctcatttatctgtttatatatatatgtcggtctatttgttaatttcaaaaaccattctaaaaaatgtatttttagtaaataagatttataattagatgacttaaaaaataataaacttaaaaaaaatccatatttaaaaaataaaagtagacttgagacctaaatcttatgtttgtcaaaagattaagctcgttaaaaatatgacttgatcattattattcacaggaaagaattatttcattatttgataattttttaaatatgttttattattaattaaaattattaaaactaaagaaatcatatatcttattttttatttaataagtttcagttataatgtcatgatgtctaaaagaattaataataaaaactatattaaaaagaacgtactaaaattagttacccatatcttcctagaatcttacctttatataagaaataaattagtccattttttcctagtaataatacaatagaaaactatactgtattgtcacagtgaaatttgatacaacaaaatgttgtccctttcaccatttcactaaacattaaaatcgcattaatttgattaatatattacttttaaaaacaacaacttatatttagaaaaaattaaaacacggaaacatattttcatttaattaactttttcattaaaaaaataatacaacaaaaatgtatttctgttaagttaatttttttacaagaaaaaataacaacgaaattgtgtatctatttagtgttgaaagtaaatacaaagcaaaaatctgttttcattttgttccggtaatgcacatccctttctgttttcattttgtaccggtaatgcacatcccttgtgaaaaaattgaaaattattttcattaggtattgatgatcaatgaaaacatgtttctgttaaggaaataaggaaagaatacgtccaatttccatcaaacagagattattgcaaagcaagggtcagtgtatataataataataataatatataaacaaagtaaattgtgatataaagttttttattactcaaatttttttattaaaaataaagataaaaaatgatatattaataacaataagcaattaaaaagattaaggtagattggaagaaaaaaaatctcattattattaatgaggggatgggcttctcgtggtgactgatcgatcagtatcccactcattaattggagcttggacgctaagttatatatataggtgaattcgtaaagaagatcaccaaccaccacttcatgcagcaactgcgcatttgttcatttggcctggggttgatcgattacttccccatccaacaacgtaagactacttatgatgtatttttatttttgaccatggattgagataaaatacacatgcaaatatcctacttatctgttaataagtgcttttcttttcgaaatcttttaaaagctactaacgttgaatacatggttgataaaacgaccagatatacccactaggcactagctagctataccacccaatatcatactccaatagaaacttcacctaacatgtaggatatactgtatgcgatgagttatatccaagagtgaggagcaataattaaatctttgcgtgtaattcacttgttttcccctcaaacttacggttcttgatcatcttcgaaacaatgtaaaaaaagaaaattgcattttcaactctaccataattctattctttgaaaatgattaaggatgcgtttagtttagaagataaatataaaatataaatttttaaagtaaaatagaatgtaaaatatgtgaattctataaaaaatacaatttttttctttaatattatttttcttctttctaccaaacataccataaaggatgtgttatggggaaagttacctgaggtgctagtttaggaagggtcttaatgtaaaattccaggttatcactgattattaattaatgctgtcaaaaggaaaggttaaaaaaatgatacaattcacggattataaaataataaagcttctaattaaataatgcataattttgaactcgttcatatattcatatattattaaaaaagcgtgctaaaaatctagtgattgtttacaaatattcgttaatatattttgaaaaatataatcattcagaaataaattcttaacataatataaaatacagttatataaaataaaatgaatctggtcatatttagataaatatcaataaacacttataaataaaaagaaaacaaaaagtaaaataaatcaaatttatttcattatttaaaatcaaataatacaccttcactttttttaaaaaaattacatgaaagagcttacataaaagttaaagtacataaataaatttaaagttatcgaaaatgtttaatttattttactttttttttatttttttcctataaatacctattgataaattgattcaaacagaacagagagccccttgtcttcttccattgtaaagcctcaaattttaatcaaatcaaatgtaaagcaaaaaaaaaaaaaaaaaaaaattctttaatccgtacgcaaaaagttagcatttatcagtatatgattggataaaaattctactcatggcaaaataacttgtctcaatatacatgcttatattattaacagttagtttggtttggccatatgaaaaatacaatgaaagaaaagagagagtatatatatatatatatatatatatatatatatatatatatatatatttcttcacatgaacataggaaaaaacacaggaaaaaatttgggttccatgaaaaaaaaaaatctcctccataatgcgaaaaagaaatagagggaaagaagaaaaaaaaaccatttaaccttttcttccttcattttcatcgctaggctcactccttcaacaaccaaccctaaccccactgattttaaccatcggcacgcatggagacgaatccacaaataatattatgtttacatttttagttgctcaagggagttgcttaaataaggtaactattacttaaatgattcataccaataaaataaatatttttcagtcacaaaattaatgtagttaatgttaagtacctattctattaactttagcattaaaataaatttttgtataatttttttaaacctatgtgtattataggtctcataaatttaaaataagtaacacatttagatttagataataatgcattataaatatttataattattttaaaatattaaaccaacatcctttatatattaaactaatttttcttaattaatttgacaaaaatacaccatgttcttgaaaagagttgcataaataaataaaaaatacaactttatacaagcatgctgtctgaacttggattatttgttgtggttttatatgtacgccttcattcccaaatattaatgtgtcaacaaaacgagcaacctttgaatgtgcacatagttggagcgtcaacggattggctgtacctagcacgtgtaagcacatgcatgcttttaaaaagatggggaaaaggtaccacgtgaataagaggatcaatattttgagctgaaaagttatatttctgaaacttgaatactgcaaattatagttgagattccttttaagaagctaataaaaccgtttaattcatttgcagaagcatacattacacggataagtgattcccggacaataattatcattgattaacgtacaattcattttgctatcacagtttggccaaaatatttcagagaataaagaaacgactggagtatcttacaatgatggggatatgcaaaagaataactgtaatatgtatcttacaacgatgaagacatgagaatgcccgcaatatctttatatatattgtgatccctgagcatgcgtcaacatattttaatatatcttgtgatccctgagcattcgtcgacagtaaaaaaacaacgcaagaaatgagaatatagtaagcagatgatggttgggaactaatttgcgattaggagatgaaaaataagaaatctatatgatgtattaaaataaattcaaataattgtttttggtttgtatagctaattaactacgaaaagaatgtagttacctacaaaaatatagttcaaaactaaataaatgtcttaaagtcatcaattgaaggacgtcgaataatgctgcctgagaaacaatttgctgattatgaaattgaaaggaaatttctgaactctcttggtgcaaattattatgaaatttaaaggagatttatagtttgaactctcttggtgcacggacctagtagttcatgtgaagttaaagttaaaagaaaaatgcttaatggcactaatcacatttcattagaatgacacgaatgatgtgaaatctcattttactctaaatcgcctaacatgattttctcactccttcaaatttttttatgcaatttcaattccaatcgaaagaagtccagcaatttcaatttccttgaatggattagcttgccttcactcgcttgctgccactaatatgtgtgcaccccatgtacctaattatcacaccaagtcttgagttgaatgcatcaattagaattcagaactccagcccaatctctcatctctcccaatcctatatatcaaacaatgcaagtttcatttttaatcccaatttcgtttctcaagtttcgtttccagtgttattattggataaaaaaatttccctactgcaattgggttgattgttatattactgaatttattgataaacaaagtttttttttccaataaggttttcaaaaaggttataaagaatgttgtgtgcctttgtctcattcgatcattcttatctttcaaacaggatgtgacttttgttgttgatggggggaaaagcttccacaattaacgggcagttactacaataacattgtgattagtaggataatgcagtttgattttaaaatatctcaagattttaatttattaatatttaaattaattacaggtaaacttttcgtgaatttcgtacttaaactcatcgaactacatagcatacatagctcaagttaaaaatatgacacgaaggcgtgaggcaagaaaggttgtcagacaggtcaccttatggtttccctttcatgaataaaatgattccatttctttctcttgtacttcaaatgcttaaatatcggtcctaaactaatctaagaagtataaagggtcaatttttcacgtcattagttatctaatctactacagtattattcacaccattagtatttcattactcaactctactattagttattttaatgaagtgcaaaaaaacatagttattagtcacaatcaatatttttaataaaaactaatgactagttaatataccttaaaattgttggttggattttaacgggaaaaactaggcctccatggtgttacgaatcaaaatttaaatttccactaagaaaaatatttgtgtttagtatttcactgtgtctcgtataaaattagaactgaattttgaagaaggatatatgtgaaaacaaaaaatatatcttaaaatttgaaattatatgataaagattcagtcaatttgtatcaacttatcaaatttcaattttattttttaaaaacattaaaatgatataactaaagtcatgttagatgtctactaatcttaatcaagtcacgtgaatttatttaaagaaataaaatttttataatacttattttttcatttacagaaagaagactcaagaaataaagcttcttaacttcttagttcttactatttcttaaaagtcaaaaggaagaaaaattgacccttgataattaccatttacccctcaattttaccaagtttgaagagccttgtacacacctagacaaaaaataaaaggataatacaaattgacccttgctaattaccattgacccctcagtttacaaagtttgatgagcctttgtacacagctagagaaaatcgttgttgttacgctctcacgaacacacgcataccctctgcactctctctctctctctctctctctctctctctctctctgtatatataccctcacttctgttctagcaccttccattactccatttcctttctcaactgagcggtgagtgagtgagacggaaagtgcaaagccaccgtcttctcttctcagagcttggctttgcttatcgattctctctcctctcatctttttcattcaaggtaattctccgtccaaaccgtcttagatcgcaccttattttccacttttagtcaaaaaaaaaattctcgcattttggttccaggttataaaacggtgctagttatgtttccttttaacaattctctgaacaaggttctccgattgggaaaatgtagccactagaactcaaatttgtttattagtgcttcttcctgtgtgagattgcctctgatagcagaaccgtgtcttcattttattttattattacttggaattttgtttagtatgtattgattgttgtaatgaagttagattgatggttatatcacttcaatgtagttgatctgtggtttggtgtcttattttgcatgctactcaccctgtctggttctgatctgctacaagtgagatcttggatcttgccacaactagacaggcaatttgttttgtatatatctgttgtatatgtatggctgcagttgcgtagttcttctggtttattaactgactttatgatcttatctggattttatgggagaatctctgatttttttttttttaatatggaaaatcgtcaggtagttagggcgttgtcaattgatagtgatatttctgagtcagtaggcaacatgtggttgttgtttattccttattgagaagcataaattataagtctcgtctaatcgaacctttattctatgatattattaataatgtctgttaatttataaatgttggcagtttaacataatgttaaggatgctctcctttgtttattaattttatgtacaccgtgctgttctctttttccatttaaaacaccaccaccttttctagttattaattaaatatatttcaacttgcaggcactaatgtgattgtttgatttcccctctttgttcttgttcttgtgtgtgtatgtgtgttttatgctatgtacttttgttatatctggtttaaaacagatatagtctttgaagtaagtcctagtcttcattggctgtaaatgtctgggtttcatattcgtcggtttttttttttttatcttttttgtaaagaaggggttcggttaataaaaagtaaacatagaattaattaaaatagaatgatctattacgggttgttcatacaataaaatgttgatacgttacttgctggcactgtatttcatggcaccctatgctttctgcaggttcgtaaaagatggccgatgctgaggatattcaaccccttgtttgtgacaatggaactggaatggtcaaggttagtacttcgtggctttgttttttgtttcacctgcatgtgcatctgcaagccttgagttcataactgaatctttgattttaatacggaacaggctggatttgctggtgatgatgctcccagggctgtctttcccagtattgttggccgacctcgacacactggtgttatggttgggatgggtcaaaaggatgcctatgttggtgatgaagcccaatcaaaaagaggtattcttactctcaagtatcccattgagcatggtatagtcagcaactgggatgacatggaaaagatctggcatcacacattttataatgaacttcgtgttgctcctgaggagcacccagtgcttctcactgaggctcctctcaacccaaaggccaacagagaaaagatgacccaaatcatgtttgagaccttcaatgtgcctgccatgtatgtggccatccaggctgttctctccttgtatgcaagtggtcgcacaactggtttgtatattaccatctgtcttgattcattcttttataatcacatcattctttccctgaatcaattcctttcaaaacaggtattgtgttggactctggtgatggtgtgagtcacactgtaccaatctatgaggggtatgcactcccccatgccatccttcgtttggatcttgctggtcgtgatctaactgatcatttgatgaagatcctcactgagagagggtacatgttcaccacctctgctgagcgagaaattgtccgtgacatgaaggaaaaacttgcatatgttgccctagattatgagcaagaactcgagactgcaaaaagcagttcatcagttgagaaaagctatgagcttcctgatggacaagttatcacaattggggcagagagattccgttgcccagaagttcttttccagccatctatgattggaatggaagctgctggaattcatgagaccacctacaattctatcatgaagtgtgatgtggatatcagaaaggatttatatggcaacattgttcttagtggtggctcaactatgtttcctggtattgcagaccgtatgagcaaggagatcactgctcttgctcctagcagcatgaagattaaggttgtagctccaccagaaagaaaatatagtgtctggattggaggatcaatccttgcatccctcagcaccttccagcaggtgattgttttatcattaattagctcttccatgtgtgccattttgattgctaaaaaatgtggtggttttgcagatgtggatttctaaaggtgaatatgatgagtctggcccatccattgtccacaggaagtgcttctaacttccaaaatatgcttcaatggtgaaatattttccgctccagttgtttttatgggtctttgtcatgtcatgttaacgatattgccatggataagaggtgaggaagtatcattaaaggagggtctattctttagcttgatgcatcatattttgtgtggcggccagacagttagagagaggcatttcttgcgtttggctatccgtggttcatctatatcttcttagtaggtgtttgtagcaaggtagttgataagttgataagatatagtaattttaggataaaataattaagaaaataaagataaaatatcaaataaagactttaaatagatagaaattatcttatcattaattattgttagtagttattgttattttgttatttaggagcaataaaaggaagaaaaggagctaaaagataagataagaagataatctcttgaggttttgctaacctgtctataaatagggaagccacagaacctttgaaaacagaacttttacatgagcaatatagagaacaaggcagagaacaatcataagaagggaaaaacgcattacgcgaagggattcaaggttcataaggaggaagccaagattgagggtttgaatactcttcttctctgtattctttcttattattcattcttattgtattgagctagacatatcatgtctagctaattctctgtgattgtggtgaaagccaaaagccaatgtgaactcttgtgttgcttggattgatgattaatgaatattgttatgatttcttccctttatcttgttcttgaatttataaattccattaatagatctgatcaatctgttagaggaacatagggctttaattcgcaatagacatattggggttttagtttctgaaagcgataaagaggacagtttgacattacctagacatagggatgaaggattgcaaagttttcatataccaacttaatgcttaatctgaaagggggttactaagacattaggacacttgaataggattaaagggttgaaaagaccgacaaaatctgggttcaaccaatttatgaaggtgtatctttgagaaagataataattgaaattaattatcaattcaatctacattaggagggatcaaaggtgattaggttttcatcacaattattctttattattgcataaattctcataaatcattctcatactttccttttatttaaattctattttttttattatttaaatccaaatcacaaaattactctcaaattcaatttcttttatttctattctttccaattttaagataagagttacaattattttagtgcctcaatcctcgtggagacgatactctacttactaaatttattacttgaacgatcggtacacttgccgtgagttacgcaatcacactctttgtgaacgcaacaagtttttggcgccgttgccggggattgagtacgccaatttaattgtaattttatttttaaaattggaatttgtttactaatctgttttctagtttatgcgaggttcaattgaacttgaaagcttacagttcgatccagaaatagagaaaactgcaagaagaaacaggaagctagctaagcaaaaatagagagcagaaaactctaattcacaatctgcagttgaattagagatggctgaaggcaacaacaatcagccaagacctggagatgaattaatggaggacatccttgctccattattcaccaggcccaattctagcatcgtcagaccacccatagaggcaaaccactttgacattcatccatcattaattaatttggtggagagaagccaattcggtggtgaagatgacgaagacccccatgactttgtggacagattcttgtgaatttgtgatacaataaaacatcaaggggtaagtgatgatgcaattagactgagattgtttccttttgcagttaaaggaagagctctcagatggttagacagacagattcctaatagcatcaccacatgggatgaactagctgcgaggttctttgcccaacacttctctatggaaaaatacaacagattagtgaatgaaatcactaattttactcaacatcctagagaaacattgtgtgcagcttggaacagatttcaggagctaatcagaaaatgtcctcaatatgatatgcccgttgggaagaaggtgcgaatttttttcaatgggatgactcctgaatcaaggatgatagttaatgttgcagcaggaggaacaatcagatctaaaacagcaaatcaaacctatgagttgattgactccttagcaacaaacgagaatgaaagcatcgtaatccagcccaaaagagagacaatccaattgggaagtagtgatgccatgttagcagaacagaagctcttgtcacagcaacttgctaagcttaatgagagaattgacaagcttcaaatttctgcattacaaaccgcacaacttagagctccagtattcagttgtgaatattgtcaagaagaccatcagacaaatgaatgtcccacgttaataggagcagacccaatccaggtgaatggtgtgtggtatgaccagagacctcagcagaatttccagagaaataagaattttgctatgaataactttcagaggaaatatcaaggaggagggttggactataaatccaacaattatttacaacccctacctattccacctaaagagccctctgaattagagaaagctatgatacagctgtccaaaaccactaatgagcatattcaagcaacaaatgcattcatccaggaaaccagagcccaattcaaaaatcaaggtgcatctattcacaaccttgagaatcaaattggacagctatcaaaacaacttgcagaaagacagccgggacaatttcctagtgatacagttgttaatccacgagagcaagctaaagcaatcacaaccagaagtggaactgttatcacacctcaagaaaagaataataaagtgcagaagaagaatggtgaggaagacaaaactgatcggaaagaaggacaagaagcagaagatcggacaatcacaggtaaggataaaaattcagcagctgaaaagcccaaacaggtatttgatttttcacgttttgaaaaaccaccatatcctatgaggattaagctgcaagagcaaaagaaacaatatgctaaatttttagaaatgtttagaaaattgcatgttaatataccatttgctgaagctcttgctaacatgcctaattatgctaagtttatgaaagatttagtatctagaaagcataaattaaaggaatgtgaaaccgttgtgcttactgaggagtgcagtgccataatccaaaagcgagttccaaccaaactcaaagatccggggagtttcaacattccaattgccataggtaatgcaaatgtgggtaaggcattgtgtgatttaggggcaagtattaatttaatgcctttatctatgtgtaaatctttgggaatttctgagcttaaacctaccatggtgtctcttcaattggctgacagatcattaagaaaacctagtggagtcattgaagacattttggttaaagttgataaattcatattccctgcagatttcatagttctagacatggaagaaagtgagatacctattcttttaggtagaccatttttagccacagctagagcattaattgatgtagctgatggaaaactagagctaagaatgtttgacgagtctgttacttttaatgtttttgatgctatgaaaaatcctattgataaaaatgattgtttcagacttgatatattagacactctagtagttacagaaaaatcaagtgaccaggagctagctgaagtactgaaaattcaaagtgaagaaaatcctgttgaggataatgaagctacaatagaagtgctgaaaaagaaagaagatgatatcatcagtgaagcaccaaaattggagctgaaagaattgcctgaaaaattaaagtatgtattcttgggagaagaagagacatatcctgttatcataaataaaggattgtctgctgaagaagaggagaagctactcaaggtactcaaagcacacaagagtgcaattggatggtcaatatctgatctaaaaggtattaacccatccttctgcacacataaaattttgatggaggatgatgtgaagccggtaagacaaccacagagaagattgaacccaaccatgaaagaagtggttcgaaaagaagtagttaaactgcttgatgccggtatgatttacccaatctcagacactccatgggtaagtcctgtgcaaatcgttcccaagaaaggtgggatgactgtagttcataatgataacaatgaactaattcccactagaacaatcaccggttggagaatgtgtgtggattatagaagactgaatgatgccacacgaaaagatcacttcccattaccattcatggatcaaatgttggaaaggttggctggacatgcatattattgtttcttggatgggtactctggctacaaccaaattccagtggcacctgaggatcaagagaagacagccttcacatgcccttttggggtatttgcttatagaaggatgccatttggcctttgcaatgcgccagctactttccaaaggtgcatgttatccatcttttctgacatggtggaaaaaggtttggaagtctttatggacgatttttctatctttggctctagttttgatacatgtttaatgaatttatctaaagtattaaaaagatgccaagaaacgaatctagttcttaattgggagaaatgtcattttatggttcgtgatggaatagtcttaggacacaaaatttctgaaaaaggtatagaagttgataaagccaaattaatattgattgaaaaactcccaccaccaattaatgttagtggagtgagaagttttctaggacatgcaggcttttatcggaggtttataaaagatttttccaaaatagcaaaacctctaagtcaacttctaacaaaggaaacagaatttgttttgaatgcagattgcatgaatgcctttaatttgttaaaagaaaaactcaccactgcacctgttttaacagcacctgattggaatttaccatttgaacttatgtgtgatgcaagtgcatatgccataggtgctgttcttggtcaaagaaagaataaattgctgcatgtgatttattatgctagtaaggttttaaatgaggcacaattgaattatgccacaactgaaaaagaaatgctagctatagtatatgcattagataaatttagatcttatttgataggatctaaggttattatttatactgaccatgctgcaattaagtttttgatgaataaacaggatgcaaagccgcgattgttgcggtggatgttgttatttcaggaatttgacatggaaatcaaggataaagttggagtggaaaacaaagttgccgatcacctttcaaggataaaagaaaaggaattacaagatggatcagaactagccattaatgactcctttccagatgaaatgattatggctataattaaaatgggaccttggtttgctgatatggctaatttcaaagccgcaggcactgtccccgcagatttaaagtggcaacaaaagaagaaatttttccacgatgcaaggaggtatttctgggatgacccattcctttactacaaatgtgctgatggtatcattcgcagatgtgtaactgaagctgagctaccagaaatcctctggcattgtcattcatcagaatatggaggccactttggagggaacaggacagctcaaaaggtgctacagtgtgggtattattggcccaccatgtttaaggatgcacgaaattatgtggaaaaatgtgacaaatgccaaaggactggtaatatatcgcgaaaagatgaaatgcccctcaataatattctggaagtagaactatttgatgtttggggaattgacttcatgggacctttccctaagtcatactccaatcagtatatattggtagcagtggattatgtttccaaatgggtagaagcggttgctttacccactaatgatgcaaaagtggttgtgtcattcctaaggaaacatatattcactagattcggagtaccaagggcaatcataagtgatggaggtgctcatttttgcaacaagcaattatctagcttgcttgttaaatatggagtcacccataaagtagctaccccgtaccatcctcaaacaagcggacaagtggaaatttccaacagagaactaaaaagaattttagaaaagactgttggacattcaaggaaagactgggcaaagaagttggatgatgctttatgggcatacagaaccgctttcaaaacaccaattggtatgtctccctttcaacttttatatggtaagtcttgtcaccttcctgttgaattagaacataaggtaatatgggctattaaatttcttaattttgaactatctaaagctaatgagaaaagattattacaattaaatgagcttgatgagttcaggatagatgcttatgagaatgctagactttacaaagaaagaacgaagaaatggcatgataggaagattcgtccaaaagactttgcaccaggacaacaggtattactgtacaattctcgattaaaactctttccaggtaagctcaaatctcgttggtctggtccatttattgttaagaaagtttttccatatggaacaattgaaataaccccacctaattctgatcaatcttttaaagtaaatgggtataggttaaaaatttatcatggaggggaagtggataggaatactatttccataccacttgattcccctgaaaattaaagagatcggtgtcaggctcgtgacgttaaacaagcgctacttggaaggcaatccaaggatttttacatttatacttcattagtttaatttattattaaaaaaataaaaaaaaataacaataataaaataaaaaaaaataatgaaattatgtgttatttctccccttacaaaatgttttatttattgctggggacagtaatgtttaaaatttgggagtggggacgcataattgcgttaacttttgagaagaatgtttaaatagaaattaggagcaaataaaatgttaagaaccttaaataagttccagatttaaaattgttgacacagtgataaaattttatattgttgattgatttggaacatgtagaagacagttaaagtatagaattgcatagtacaggattagaactacaagttaggtgattgaatacatcaggaaaaagaatagaatacttgttaggaaaatcaaaggaacattagtctgatactataagtttgtgaggtttgagcctatacagtacaatttttttccagagtgacctcatggttaataatattgcagggcttgatttgtttctcaaatgatatttgcatgattaatatgataaaggcatgttctttctttctaagctagagccaaatgaccgtacctttaaaaataatatccatagttagtcaatttgagcttaagctttttctttcattcaccttaaaaactttatccctgactaccttatttgagattgaagacaaagaagttaggtcaagatcaataggaatagaaagatgaatagttgcaagaaagaagaagaaagaagaaacaaaagaaaagtattggatgcatcaaaaaaaaaaaaaaaataaaaaatgaacaaagcaaagcttgagaagtaaagtaagagaaaagaatggaaatataaatctggaaaaagtagaaatacagctattgtatgaaaaaaaaaaaaagagagagagagagaaaaaaagaaagaaaagaaaaagaaatggctgagtacgacaataagagaaggaagtggatcagataagaattgatcaagactaacagacttcaatctcaaatcagctactatccaaattattcctacctcaagccaggcctcattacaacctttaaagaccttttgattaattgtgcatctattcatgtttctcatttttaggaacctgagaatataatcaagttcatgttcatattatagctttggaggaattgagcggttatacagttacccaaaacacttgagtgatgagtgatcacattcctaagtgagaagtattcagactatgctcatgattgatagacttaacaagtgttcttgaaattttcacaagtagttcaattgcatttaacaaaatagttataagattgtatgtgcgatgatatgcttaattgttgaatacaaaatccattgaaatcaagttttattttattttattgctgaggacagcaatgtttaaatttgggagttatttgataagttgataagatatagtaattttaggataaaataattaagaaaataaagataaaatatcaaataaagactttaaatagatagaaattatcttatcattaattattgttagtagttattgttattttgttatttaggagcaataaaaggaagaaaaggagctaaaagataagataagaagataatctcttgaggttttgctaacctgtctataaatagggaagccacagaacctttgaaaacagaacttttacatgagcaatatagagaacaaggcagagaacaatcataagaagggaaaaacgcattacgcgaagggattcaaggttcataaggaggaagccaagattgagggtttgaatactcttcttctctgtattctttcttattattcattcttattgtattgagctagacatatcatgtctagctaattctctgtgattgtggtgaaagccaaaagccaatgtgaactcttgtgttgcttggattgatgattaatgaatattgttatgatttcttccctttatcttgttcttgaatttataaattccattaatagatctgatcaatctgttagaggaacatagggctttaattcgcaatagacatattggggttttagtttctgaaagcgataaagaggacagtttgacattacctagacatagggatgaaggattgcaaagttttcatataccaacttaatgcttaatctgaaagggggttactaagacattaggacacttgaataggattaaagggttgaaaagaccgacaaaatctgggttcaaccaatttatgaaggtgtatctttgagaaagataataattgaaattaattatcaattcaatctacattaggagggatcaaaggtgattaggttttcatcacaattattctttattattgcataaattctcataaatcattctcatactttccttttatttaaattctattttttttattatttaaatccaaatcacaaaattactctcaaattcaatttcttttatttctattctttccaattttaagataagagttacaattattttagtgcctcaatcctcgtggagacgatactctacttactaaatttattacttgaacgatcggtacacttgccgtgagttacgcaatcacactctttgtgaacgcaacagtagtgattgtgatgatctctttttcccccattttcttcttgtattaagtttacatttgaaggattttaccccttggaacattgaatcattgatgttaatagtcatatgtatcgagaaatcttattattattgttattgcccgttcttgcccgtaaattcatacagcaatttttatgtatgttgaattactggcttcggagaaattgagggtgcttatgaattatgtcctagaggcggcattaagtccatttgatgaaatgcatagatcactgtatgatgttttgtcgttgaggtgtcataaagtgacaaccagtgattccataattgtatagcaaaaaactttaaaacattttcacgattgatttgtgtggaagctaaataccaaaatatagttattctaaaacatattattggcttgagactgctgatcattaattgcattaatttgttaatcaaaccaacatgttccatgccaaactgctgagtttgactttaactgcctatgtggcatggaacgtgtagtttaattagcacgttatgctatgcggcggtgtagtttaattagcacatttcatgctaggtggcggttaaccttgcatgatgcatatcaattcatctttttgtatacacatttcaattctaatgcaaaataagtgtgacatgtaaacatttcatcacagtacgaatagatcagtaattgactcattaatttcatctttatgtgtacacatttcaatgcaaaattaattttatcacatatgtcaaatagttaaaatatgatatgcatcgagattactttagcgagtcaaactagcaaggttagttttgattgtaaatattgtatcgagatgtataaacaaagggggaactgatatgcaaggtcaattgttgcataggcaatctaagttaaacttgtcagtttgattagtgagtttgacttattgcatgcttgaaaattaggtgaaaaaaatacttttcaagtcaaagtaattttgttaaaggattatgactcttgtttttatttttatccattggatttacaaatttgtatttgaatgtgactaaacattctaacttcaatttagacatgtaattagactatttacgtaacatggaacatattagtttaatcagtgagttgacacaatcaacgatcttatgttgataatatatttcagaataatctcattttaggagtatgaatttcctaaaggtactctgatttgttcaaatcagcccaaggaaacatataggagaggaagagaatgcactcaaattccaatttagaatttgatttttgatgatctacatgcatggttcaaggtgagccttttacaggcaaacttcatggcatataaaaatattaaacaactatagttaattgctagaaaacttatcaatgtgatacatgtttgttctaacttaattttttttaaaacaactttgcgaagctgaaaaaaataaccacttctaataacagttttttttctctctccaaaagttactacgttaactcaatagagcatcaacacggtttttttacagtataaatattttaaaacatcttttaatttaattttttatgaaaaaattcaaacaataaagcaatcctacattctgtagcataaaaaaaagtcctgcaatatccataaccttaaataatttcagaaactaataaaatccttttttcttatgaaatgtttgattggaaagaaaaaaaataaaaaagaaagaaaaacacgaataactatataatttattttgtttagattaaaaaaaaagaaaaaagaaaaaaaaagtttatgaaaatatcattccactttcctttcaagttttcaaattttttcttttcttttcactatctttgtctcattccaaacataatatattatactattagtatcatacaatattttcaaacaacacacaagtcgcgggtcccgttgtcccgggaaaccgaaaagcttcaattgtttataggaatactcgtttggttgctggcgccaaaatgaaaaggatccgcgtgacatctcataagccaatcttaaccgtccgataaacccacacacggatcgctccaaatccaaagctccctccttccaaaatttaaaaccctataaagcgctcttgattccaccaccaaagtacaaagcaatctcaactttcaagtttaggtcactcctcgagatggcgcgtacaaagcaaactgctcgcaagtccaccggcggcaaggctccccggaagcagctggcgacgaaggctgctcggaagtctgctccggcgacaggcggagtgaagaagccgcacagattcaggcctggaacagtggccctgagggagatcagaaagtaccagaagagcacggagcttctgattcgaaagcttccgtttcagcgtttggttcgtgaaatcgctcaggatttcaaaacggatctgaggtttcagagcagtgccgtttcggcgctccaggaagctgctgaggcttatttggtgggactcttcgaagacaccaatctctgtgccattcacgctaagagggttactattatgcctaaggatattcaactcgccagaagaattagaggggaaagggcttagttttgttatcccctttggttttagggtttacgtgtttttatttagccctttctggtttccgtctctgaatctttcaaggtttagattaattgtaatgatggcattctgaatgaaatattgaaattatgcgtattctcttctcgttttatattctttctgactagccaatagccattcttaagtgaatggaaatgatttgtagggtcttgtggttgactgttggatcagttgattatgcaaattgggtggtgtggtagtgtggttcattcactcactcttgcatgattactttttgtcggtaagataaatcaagcaaatttgtacttccaacattaagcagttcttttttactgtctaaaaaaaatacaactgtcttgttagatgaatgaagaagtcactgaattgaactgtgaaaaattatggcaattgcggcacctccatagtcgttttttattcttagctattaaatttataatagtttattgtattaactttgcctataaaaaggccacacatgtaacattttaatatatgcagtgagtgaacgaaatagtgagtgaaagttaagctaaattgttttcttcctcacagtgtgcgcgcgttagataattctcggtttatattctttcgctgcgtgtgtttgtgagttgtgtgtgaatgggtttaatttaaatcccacttttcacactttgtaaatcacagctgctttcaaaacaaatataagttcgtattgtgttctatcttgcggtttgtttgtgctctggttttgcgatggaaaatggttgtaggttgtgttctgatgctgcctgaaatatgatgcccttttatggtgatggtgttagaagattgtggttcctgctgcttcaatcattcatggtaatttttgttcattttattttttagatattaactgagtaattgtaatttaggctatctagaatttttggaactcaaaggattattcttgcctcttatatacaaatttttgtattagaagcaaacaattattcgattttgacatgtttttcaaaccaaccatctccatggtggatttaaagatcatgtcaaaatattgtagaactttttttaaatattgacttttagataacaaaaaatcttgtctttttcattatctatgcttattttcttatgagaatacttttggccttagacaaatgagagtacttgtagcttacaaataagctgttaaaattttcttttaactcttagatatgattagcgtattatccagatacaagacaaaggaaagtactatcctgtagcttacaaatataaaatacaatgtcagtttagttctcctaaattgtttaacagtttagtttaaacgaataatttttttagtttgtaatagtttacgacaatttaataatcaatttgaatcgaacaactttacttatatcattgctttaggtattgcttatttgcataaagtgatttcttctgtttgcgaactcaatcttctttttccaataatcttgaatccttcccatatataaatgcattttttcatcaacttgaacaacttctacgtctaaatgtgctaccaaggctgacaaaattttaatagatgaattcttcactaactatataaaatacctaattaaccttgtgagcaattgaacaaattcctttgttactgatcgtgccttaaattgaacatcattctttttaaaaagccatctttctttgcatataccctttgcacctaattgtctttttccaataatcttgaatccttcccatgtataaatgcattttttcactagtgtcagcttaagatctattttttaccatatctttcactaaaggatgaaacaagattttcaatatggagaatttgatcttctataagattcttaaaaatatatatattgatatattttttttaactctttctccctaatagcaaaatgagaaaggattcaacaaaccaacataagaagaagaaagcaaaataaatagccaaaaaaaaaaacaacaaaaatagacatttaagagaaggggggctcacggtggaggcttaaaaggaggaagagaatgaatcacggtaaaggaagaagcagaggaagaagacaatatgtgacgaggagagagatcaaagaaaagaaaaataaaaaagaggaagtgtgatgaagagatgaagaaatatttaatttaataaatatgtaaaagtgaaatctaggtgagacctatcaaaagttatctaaaattttaagatgaaatatatcaataaaataaaaagtgaatttttttataaaaatctttaatattaaatgatatttttcactaaaatataatctaagattctaatttaaaatctatcattaaagatattatatcacctaaacttcttttctttggccattacaatctttcatttttcatttctaaacattaaatagcttttttttttttttaattgaaaggaatgtcatctcttctactcgtgtgtgtatatatatatatatatatatatgattttttttatttgcagttttatacgtgtttttcaatctctttaattaatatcgtttatatgtttgatctttttaatctatccttttttgttctaactttagccaaattttaatattttttaaattttggtaataattaaaaataaatttacattatattttaattttttattatagattaaaatataatttatgcattacataaactaagatatttattctttacaatatacaaactaagataatttcatacttgtgactttaacaatttcacaaactaaattaaaatcctttttagcatacaaataacgagacccgtactcccgcgaaaccgaaaagcttggaatttcttttgagaaaaaaaggcaagaaatgagaaatacacatctccactccagtggcgccaaaccaaaactaaaactaaaaatggttgaaaaagatgaatccgtgtgatatctcaaaaccgaaccgtaaccgtccgattgactcacacacggatcgctccaaatccaaatctctgaaacacaaaactccctccctccaaaatttgaatctctcatctataaaactaaaccccctttcgctctaaacctcgttccagcaaagcgcaaagcattatcaactacgattcattcttccagaagcttctagagaactccagatggcacgtacaaagcaaacagcccgtaagtcgaccggcggcaaggctccgcggaagcagctggcgactaaggccgcccgcaagtctgctccggcgaccggcggagtgaagaagccacacaggttcaggcccggaactgtggcccttagggagatcaggaagtaccagaagagcacggagcttctgatccgaaagcttccgtttcagcgtttggttcgtgaaatcgctcaggacttcaaaacggatctgaggttccagagcagcgccgtttcggcgctccaggaagccgctgaggcttacttggttggtctctttgaagacactaacctttgtgctattcacgcgaagagggttaccattatgcccaaggatattcaactcgccagaagaatcaggggtgagagggcttagtttcatagttcactttggtttagtgtttaagtgtctttgtttaacgcctcgtttgtgaatctagatcgttgagctggtgctgattagatttcttgtaatgatggtcttatatatgtaatcaagtatttgtcttaggtacatatggtttgcctgttagttgtatcacttgatcaattaaatcggatgaaatggctcataacaatggattgcatcttaaaaatagcacacgtccacttcgaaggcatgctatgcttgctcttttcccagaagttgaggagttgaaggcttgtgagatgagacaatcgatcaggacttaactatagccctaaaattttagctaatttcaattcctcccggtgtgtcagcttcaagcattacgcatccaaactagacactgttgacatttggggttaggatttcttgttattctcttgcttcattaattctacaaacttcctaaaagcttcctaaagaacagacaacattagtaattaagttgactgaaacaattaatgaggcaataagtttctatctcataccgtaataaaatcatggggtcctggggatgcctctgggtggtattgaagagacatcattctttgagcagggaatgcaaggccagcacagcttccatcattaagattactatgagtaacctccactccttctggcagtgtggcagggtcaaccgcatagttgtgcttctgccaatgatattacaaagccatgccaggcaataacaacaacaacccagccttatataactatttacatgtaatacaatcttttatgttgccttctacttcttgccgaaacaaattcagtcagtggcattgacttcatgcaataatagcagactatattggtcaaatgagacatgagcttagttgtgcataaattgttttaacaccaaaacaagcattattctactgaatgcttcttttattttaagaaagtcagggcagagtaccaaaccttgttagccaaaacatccatctaaaaccaatgttcatttctcttctttagcatacctaaaagattcatggattttacacaatatatggtggagaaggaacactacaaaatttatcaaagaattagtgtagaagaaaagtccatttaatcacatacctgaacaggatgatttcctccatgatgaccaaatttcatcttaaaggttttgcctcctaaagcctgacccagcaattggtggcccatgcagattccaaaaacaggcacctttcccagaatgttctttagtgcctcaacagcataaggagcagcagatggatctccagggccattgctaaaatgcaccccatctggcttcatcttcaaggtttccgatgctggccatggagatggcaccgcagtgattttacagccataggatgccaagcgcctaagtatattatgcttaattccaaaatcataggcaacaacctatgattgattcaccacattaggtgtatattaacttatgtattagtcaagcaaaaggaaggaggcaatgcccacagaataatacactgctaatagttgcatggaaagtctccccatgctccttagaactaaaatcccattcttgttttgttgtatcaacccattcatgcacagactgacataatactctccacttattagatcaatacctgcaaaatcaaacaacagctagcacttataagatatattttcagagcctcaaacttatattatatccataccaacaatgtcccaagaattagacagcctaagtagttcctcctctgtcttagaattgtcagtactcaacacaccaataaggctgccttttttgccgtaatatgtgcgtgatagcccgtgtgtcaacgtcatctcttgcatatcaacaaagttaaaggcaaaacttgaagttgtacagagagtagattttctcaaagaattatatattttataaattacttacaaattcccatgatgttcctttctgctaagtaatcacctagagtttctgcacatctccagcttgaggtactgcatgaatttattgcaagtagaaagaaaaggtaagcatagccaaagtaaaaagctcaatcaatgaagaacatttgtagagcatgtgaaaaaaacctgatgctcaaacttctaattactaaatttacaccagtgttatcaatatgtggatttgtcatcagtacaaactgaccagcataaccaggatctgttagaatttcttgatacctgcagttaacagatattaataaataaacaaatgaaacatcggtatatccatgctcagattgaatgaatgccggtttatatataaagttagttcatctcacccagtcaatgatgtattaaaaacaacttcaccaacttgggttcctgaagcaccaaatgactttgctttccagattgattcctttatttttcttttttgttatgtcgtgctgggtatcagaacagggctatagaggttgttttaaattttcacaagtattttcttttctgtttttaatttctgacgtttctctttcgtctatgtagcctttaaaaaaaaaaatacagcatgttgctaataattctggtatagggtgttggattttaatctgattacttgatcgtaacgtgcaaattattgtagtagatctcaaaggcttgcagaatttggtccggtgtcacaatgacggcatgattctgataagattttatatagcttaacactatttgtatattaatggagataaataaatgcaatttctttatgatattaatcaataataacaaaaaatagatattaaatgaattactttcaaaatttctactccattttatatgaaaattgttactagtaagtttcatacttggacaaccctattccgctgcaatccactcaactggtcatgataggcgatcaagaaactaagcaatcactgctacttcagtaaacataagggttcacaattcaatcataggatcaggcttcctaccattagaatacccatcaagaaattctcatcacatggagtttggcagttgtttgtttggaaattggctgtctacccttgaatcatttgagtatctttaacacaaggtatgggattgcatataaggaacatctaaaatgagtatttttcctaaccaattcttttgacgataacacaaaacaaaagtatattaaagcagaaaattgtgtaaatgatagactgacaaatgaattagagagatatataggaagtagaagggatcaccacctttccacacctgtgaatgcatcttaaagttgtttctctaggtatattttatttcttgtaactaggcgttattttgtcggctatttcttgcaacttagtcctaatacattttaaaccacaaactaattaaatatttaaataataaattaattattacacatttaattatttaaataaaccacaaactaaatcaactatttaaattaaaaaataagaaatgacgaggggaattcaactttccaaatgtcgattttcctttttctaataaagaaaaaatattaacgttcagaactcatttttcaattgtcaatttcccaatttttaaaaatgagtattcggataaatattttggaggataagtatttgtgtaaataactttttcattctatccatttattttttcttttttgcactcaacatagtattttttgtatcagcgtctcgagaacgcaaaatcaaaacgtgaatatattccgttaatgaaaagcgctagcgggtagaacagaataataaataattgaagattgagagaagatacaaaacagaagagagatgggcgtgacgaaggaacaagttgaattatccttgaaggccaaactgaacccttctcatcttgtaagcttttttttccctctctttcactttgctatgtttcgtgtttcacatgtgtttcgttttctcatttctggcagttgtggtgactattacgtatttattttgcaattttaccaccagtgtgtccgttagttctaaataatctgtgcattcaattgagttctccttcttacttaccaaaatcccaaaagtgaaatttcggtatattaactgtttggataaatttctcataaccacttatagtaaaagaaaacaagaaggaaattgaagtaagtttctccataagttaaaaaccagcttttgtagaagttaatatcagagagcttctacatattagctttaacgtaagttaattttagcttttggagaagcttactttatttttccttattttcttcttttataagtacatgtatacaacctaaagtttcatcttctaaatgactaaatgagaaatagcttttggttgaaatgaagctttatccaaggagtgaagcataattcgttggtttatctagagaaccatgaattggtttgtgggtagcaattcatggttgagttgtgagttaggtcactcccattcttgtttcaattcatgaaaatgacagttggagaagagatagacaggcagggctgtgaaggtagcatcaagatacccgagtaaagggtggagcttggagttgatgacaacggaataacaagtggagatgtagcagcactatcgggaggaagagagtgagcatgggaatgctcaaactcaaagaaccccatttgcactatgcaaattatgatgattgtggatggtcatctgtgtgtatctaattgatcttcaatttcttcgtatctttgtgtatttgggtgtgagaatctgagagaaagaaaccctcgcatcccaaggcaagtacaaaagcattccacaaacccactgcatactgacctatcccattgtactgcatacttggcaagatggcacagggcatatccaaatttgtaatatgtactggatagtattgcgaattcttaagccaccagaattgatctctttggctgtctggtttcatttgactgggttttactgctttgctccttttaatgagcttaagcattttttttccaagttatttccttatcttctttctttggtgtatatgcggcaacaagttttgataccttgtgcaaaatattcaaaccctcaccacttggccgaccttagtgggttggttatttccatatctgactgcaaccattttgtagatatcaaagagttgctgacataaactgtcttctcctgcatggattattgactttcttatttatttaattgtgtgagaatacatggttcatggtgcttctacttatccatttgatctttgtggtttagttaatgcattggaattttactcaatctaaaattctcatgtgctctatggtacctgttattatctatgactatcagaaatccatataacaattttgcaatttcctttgacactggacaatctgagtgaattatgcagtgaccttgaattaagtgttggctcttgagtttttcacacgtgtccaatcttgtaaacatttacaaaaattttatgtttgccaacgtcgtggtttgcttcatcacaaaaacttctttcagtatttttaatggagagcttaccacttgcatgttacatggggtgtgtaatactttaaatatgaaaatttgttcatgggagttacgcacaacaaatcaaattttatgcaccaaacatgaaatgggcgaatttcaggggtgtaccctaccctgtatttgacacccctccctttcttcatattctgtgttctgattttattgtatttgtgtttcaggaagtggttgatatatctggagggtacgcgtttttttcccccactaacagactttttgttctctactttgtagcactgtttacttcctcccttttttttttttttttttttatcttacaatgttataatgtggctattaggtgtggtgcaagttttgtggtggagattatatcagaacagtttgaaggaaaaaggttacttgagaggcatcgaatggtgaatgctgccttagaggaggaaatgaaacaaattcatgctctctctattaagaaagctgttaccccagagcagtggaaacaacagcaagaatccaaccaatcaaatcctgctgcctagagcatatgtttcggttataaaataagaaatacatagtgtgttgctgactattgacattgtttgtggactctagttctatgtagttttatcgacactcaaatttacaattgtactactaaattttagtttacaaaatttctggcttcccgtaagttattttaatatgtgaccctctttaggtaggaattttcaaataatttgtcccgtataccttctaggaccctttttttctttcttttttttacgtgaccatgagtttttatggtcttatataaatcacccacgtcccgtgccactagatatagtgacttttaacttttttttaaagaagtaaaatatgaatctaggatattttttttcgagtctagatacattcatttttgtttctcttaatttcttaccaactgcactctttctatgaaaattgtttacttgaaaattttagttcaattgaaggacataccagttaccagatgaattttatttcaagtctttagggattgttgccagatcttaaactgcattagagacacttgaggatttaattcgtcgtcttttgcgttgcaagttcccttgtttcatatttgtgtctgcttatctcactagaaggtttactaaagcttctaagacgtctttgcaattctgctctttcccttgcaaccaattaaccagcttgagaacttttttctttctatcctatctaatcttatcccagacacatgcgaagtagattaattcataaatgttctgaacatgaccctagtgttgtgtacactccttattgaaatgaagactcagctgcagggtaattttttatatcaaaaactttacaaaataatgtttttttctctctattagaacatgggcctttttaggttggcacttagaagaccaacgcataaagtatctatcaactggatctcgtgtccttcaaatgggaacttctaaaccacatgtctcgatagacccacacaacctttgttataaaaactaaaatgtgtcacagtttccctttggccgaaattttcagccttaataactccttatcagcaaaatagatagagcaatgagcctctcctatgcttcatccttctgtctctcatcccacgtgaagattcaatggtcactaagctagttcagccaccaatgacagactcccatgtgagtcatctcatttgtagaaccatgaatgtcatgaaactccaaaattttgttccatctagaaatcattcaagaataaacacttcaaggtttggtgagagaccattatggtttagaccatcacaatcattaaaagttgcagaacacaattctggctcaggcttagctgagcttgaaacacttgctcagaagaaaagagagctttgccaggcggtggaaggtacacactccagttattatcatctcacttttactattatgattgaaaaagggttgcaaaaaaaaaacatgtttcaaggaatcaaaaggggaatttttggaatcccatctaccaagaaatctgaagttgaaagtttggtgaagcagctagaatctctgaatccaactccatacccaactctggcacttgagaaggtaacaccgatccttcttcattggcatggtgatttgatgacatatccaaggtactaaaacaattcagttctgaattttgtatgataaaggctgtttttctttgaattgagattttatttgataacattggacctcagaagatacacaactatgtactgtttccactatttctatttttttaattttttttaaaattttatctactgacttttaactttggaaatgtgatttgcaaatggtgagcaaagcagttaatgtgatcaagttcagtgcaaggggattgagtttgttgtctggacagcttagcattgatgcctctttcaggattgcttcctcaacagttaaaactccacttcttgtttggtcactcatttctctgtaaagcattaatatggcttccaaataactacctaattggttactgcttgaaattgacagagggttgacattaattttgaaaactcaacgatcactcctgaccgggtatgttagccatatactattacatttttggcttaattgtgattttaattcttatatcttaacttatgagtgttttttttttaatcttccttattctaattattcgcatttagtactcctagtgttccaattattaaaattaaatttcatactccaaattctaatatacaatgggagaatattgaagccgtggcatgacattgatttgaataaattggcaatgaaaataatgtattttaaataaaaaaatggatttcattatatttaacttaattactgatcgaaatttggggtgtgggacttgattttaataattaaaaaattatgaagattagaaccgaacatggaattaagaggggaaaaatcacacattggctaaattataaattataagaactaaaaatgtaatcaagactataaattttttttaaattataagaactaagaatataagtatgataataacattattgtttggtctaaggtggaattttaaattagtcaaaaacaaaaatttattaatgaacagaagagttatagaaagaaaaaaaaaacattattggttggcaacaattaataacgtggcccaacgttattcatctttggcaaaaagagaagcaaacactactcattctgtgtatccatcatcaatggctgactatgaaaacgaaaacatagaagcagaaccaaaagagagaggtttggaagcgttgatccagctccatttcgagaagacccttgagaagaagcgtgccatagacctccaaaagaaggagctccacaagctctttcagtttttcttcatcctcctctcccttgtgttcatgtccctctctcactcacactctcaccatcttcaatgccgccattgctggatccctattgttaaccgcctcttattcataactcatagagtttaaacaaaactccaacaatcccctggatcccagccaggggcgctgcctcttggaaccccgcaccgtaatcgcggtcaattatgcgttggctcaacaagtgtgcactccgcactaccctaacttgtttccaaagcttaacgcgtaatcgcattggcctatagtaaatcacattactactaaaatccatagatgacactaaaatcaccaacaaatcccccccattttagtgtaatccttgatctactcagtataacgatcaaacaaatgcataaatgaaatgtcttgcgattgaatttcatcttagtacaaatacacattccatatactcaagaatcagggtatcgttacgattgaacccgtcaacctatttgaatatctgaagatattgtacacatatgttttctacaacactctactattcatacttgacactttacaagccatgtgtccttatccattcgtaagcatataggaagccaaatccaaacttcttgaagcggcaaaacttcatgctcacataggtgatccttttaatcttgtaccagcatttacaatttttcaaaagaaccattaagaagatatacttcaacctaaccatcacttgcaggtctgagcaaatgccttgggaagacaaacataattgctccaatttctaattataatctttccacattgaattctgcttctaacgttgtattagaagggaattgggtatatcgatcataattagaatatttaaatggactttaatcccatccctattaccgacttctttactaagtctctagctaaccccttcgtcaagtgatcagctaagttttgttgcgaccgaacaaactcaatgtaatgagattgtgtaataacaatccccttattttcccgtttaatcttaataccaaggataacgtctgcttctcccatatccttcatggagaactttgatgacaaaaaattcttcgtattattaacttgattttggtcggtgccaaagatcaacatgtcatcaacatataaacaaatgataactcctttaccggatttatcaaacttgctatatacacatttgtcaaactttgttcgtttgttagaaaattagtatgataatcctggataaattcaaagaatcgtgttcgtacactttccgaacaaagtatttcgaccctattcttgcctgggttcacgaaatccttgttgggataattctttgaagaacaatctgcttctggcaatagagaacagatcaggaatgtagagagaaagtatgattttcgtatatattaaatctgaggccaaatgactccttatataggagtttttccaaacaatgcaactcttggcgataaaccatcgtaaccgttggtgatcggagcggttgggagtagttatttttcttccctttcccaagagcggttataagtagttactattttgaattgttaaccgcctcttattcataactcatagagtttaaacaaaactccaacaatcccctggatcccagccaggggcgctgcctcttggaaccccgcaccgtaatcgcggtcaattatgcgttggttcaacaagtgtgcactccgcactaccctaacttgtttccaaagcttaacgcgtaatcgcattggcctatagtaaatcacattactactaaaatccatagatgacactaaaatcaccaacacctatcaccctgctctccctcgcccaccttatcttctacgtgtcactcgctcagaccctcagatgcatcaacgccttcaagtaccagaaaaggggccacaagctcactcttgccttcgcaacacaaaagctcagagagatgaagctcaaggatggtactatcgcagatgatcaagaatttgagattcagtatcaggaaccccccgagagctattttggtaagttcaagaggaattgggctcttcattttgggttcttgatcatcatctatgccttcatggtctcttcctctgtcattctcctctgcctttaacggctatctatggtaattgctttgtcacactgtgccatatgcttgatttgattctttttttcgattcagttcggcgtgtgtaagatttgaaatccattccttagtcattttttgaaaaagaacaattacatgtcattcctaaagctagaagcaattcagtgaaagatctaagtgcagatagttaaatgaggtaagccaatagcagcaatctaatatgattgatcagtgagtttgaccttaaaaaattatattagtgaagaatttagaagtgtgccggatggtttggatcttgtacgtggaaaacaggacacaaaatcaagttatcaactgacgcgaaaagaatacatgttacatactttgttgaattgtttatcaatcattaagattctttatgttgaaatgaatcccgcagtgtgacattacttttcttccattcagaacaaacaaactggatagtgaactactgaacttagtttgtccttattcaacttttaccatctaagatctttcaatttaaacatgtttcagtgttctgtttttgtagtagctattaccaattatacgaaatataaaaacaattacatatctaaaaaattaaaatcattaataatgacgcatctataacagtaatcctaaatcctaataatatacccaaatggtgcagcataagtgcacctaattacttagaggttaaatcttgtacttatcaatatacagatagttgtggagtatcaggttgatactattgttcacaaaataaccaaaataacagccataaaaaggccacaaatgtcttctaccaaaaaaaaaccacctagaaacgtagagaaagactgttttcgtagacaaaaatagaatgtctaggaaattccttttggaaaaatcggttataataacctcatctaattcaaagattttgatacaagtaaaactgcagaaccacaaaaatatatataaaatggcaaggcaaggttctacaaacacttacttgatttaacataaattcagataagccgcgcgagcattgtataggaggagttcagttacgataaggaaaaaccaaactttgaacataatcagtggcatacaaccaaactctttggtggtgaatcttactatgctctataatgttatctctctggtgatacgtaaaaattaaaggacctggtttacatttacttccaagaaaaacaaggtcgccattttcagacatgctcaatggcgaacgaataaaaaaaggtagagtaatcgcaaagtcgtgccatccagtttagactgccactcacgaactgtcctttacagtaggaactagctcgctctggttggggaaaaccagtccaacttgcaacctttctccaacagttatcacccaagcagagaactctcacttctgttttcattgattcccaatccacaaccactgtaaccactttgtaagtgtctcttgaacccaagcccaccatcttacaaccacgtcttggggtgtgaatttgtaactgtatgcgtggtgatttttctgatattaacctcgtatcagggttccaaaaccggactcaggttaagtaaaatctatctttaacagtctcagctctcaaacagatcaaaaccattgcataccccagtaaggtcgtacttcatattcattgggagaccatcatcatattcattatcaactgtgaatgatggctgctccagtaaacgttccacggtgctccagtgtagggaatatggtttgaggtcatcatcatcatcaatgttgcttcccggccagtagcctgaataggatcataggggtgtttctgtgactgctagaattttgaaggtgcagcttcacaaaagtagaatcgaaaacgagcgaattccaagacttgcaaacacacttgaatcgcatcatcagagacttaactggaaggaatgacaggatttgctcgagaaattccccaggaatatactgagtaccacgcattttcgtgatagttgatgcgataagaagagagaattattggtttgatgtttgaaatatcattgctctaaaataaaatattgaaataccgaagaaaaaccaaaagcataagatgctgtatatgcatgtcaccagcgtcggatccacgtttgcccccatttaaaattacgaccaattgccaaaagtccaaaaaaacatgacattacataaaaaaaaaaaaaaactgcatgctcattgttttgtgtaaaattagatgttgacattttaaatatggatgatgcataagcagattaaagtctaaagtttggaatgtttatcactttcaagttgggctactttatcaagtaatttatagataacttcaagaattaaacaatagatttgtggaggtgaacactaagttacttttttgtataaacttaaatataagagattcaaattttatatttgataagaaaaagttaatctgtttgactaagttttatttatcataaattacttctatgaaactcatggtgtttgaaaatcaaattgaaatttttattggagatatttgatcatctcatgatcaatttttaaagttaataaaattaatgatctttttcaaatgttggtgaaaactaaatatgtattagatggtataattacttgtgaaagttaattttaattttgcccatgacaactataacaattgaaaaatgtgtttttctgcactcaattttgtaaaaaatagaatgtgcaattacaagggagataaataattgagttgtttgattacatacataaaatacaattataatttatacaatatagatatttaaaatttctttgttcatgacatatatattttataaaaccttattgttttacttttgttgaaacataaattattttttgtccccccagtaaaaataataattttaaatccgcttatgcatgacagtgttgcgcgtgcttcacattcggtgcaaatagtttactggaaaatcatcatcctcgcaattagcttgcaaatagtctcgaataagtttttatcataatctattaaagatgaaaataagtttttgtttaaaaaatacaataaaaatttgagataggaaaaaaataaaatttgataaatgagcttgtagaagattttaaaatatatataatgataagatgccaattttcataaaattttagaaaagtaatttattatgcatatgcatgtaatactaattaatgattcatatctcaacagagatatgacttattttgcattttttttaacagaatgagttattttgcatatacaattaagcattaatttttgaataaaatatgttttgagtccttataaaatttgaaaaatattaattttattctcataaaacttttcgtgttaatttgatcccgtaaaaataaaacatatatttactagttctcaataacaatttcattatacgataatatgatgtgattaacagatttagatttacaaatgtaatttgattacaattgaattatatgttttgacagttaaaatcctcataatgaattaaaaaaatttatgaagactaaaaacccccaaaaattaaaatttctctttactttttggatcatttttttcacactttttgatgagattaggggaaagatgaaatcacaatgagttgtgccttttgagtatgcttggaaaggtagagagagaaaataattaagtcgattagtcaactctttaacgaagttaccaatgaggactaacaaaaatatgttttattttatagggatcaaattaatacaaaaaattttatgattacaaaattaatacttttcaaatttgtatgggatcccaaatatattttactcttgattttatttattaatgattgagattcttttttgtctaggtaaaagatcatgggtgtttctcaatccagattaaagattaattttgctcgttataagtaattgttactaattcaaataatttttgtaaataatgaaaatcgtacacaaattttttggctaaataaatcgctctcacatgtaatttttttattaatgattgaaattatttatttcataattttttaaagataaaattatttttattttagaacgaataaaagttttaaaagatattttttatgaaaaaactattgaattaaatatattgatttttttaatcttatcttaaatgaataatcgtttagaaattaagaatcaaaatattcatttttatctgaaccaagatgatataaaatgacaaaaatatttagttctgttgtagttaaaaaatttatttttgttttttggaaaaaaaagatattatttcattcataatgataagatgtaatcaatcatgagagccaccataaaatattaagcccttgtgaagtttaacttacccataaaaaatggtgtttctaattctataggaccaattaatattctaatagagaatatatatagagagagagagagagagtcataaaatcaattgccaaaaaatatgctcatcattgaggtgacatgacatccgtgaccagcgggataaattaagaaaaaagcaaggaaaggcaatatattcgttgtccaaaatttttggataattaacatatattttgaggattaaggagcgaacacacgatgcaagtgtgatgaatgatgggcgacacgatgtaaatgtaattataagcacaccacaactacgatcgacgttttccttttccctcgaacacgacagctctactggattcgtgctgtctcttagatcacatatttttctttcttgttgccgtctaaatctttttagttacagaaaagaagattcaactatatatagatgaatgaaagacggctagaataaactcgacacatttacacatgtaatttggtaaaacaaaaaaatatataaattcgtttcatttttttaaaagtttgtacccgactcatatagttttggtacgagtttttttttaaaatatttattaattattctattgtattttaattggggttggttaaagaaaattattattggattattgggttatgtttagttattcgttgaaaagttaatacatgtgttacgaatgtaaaacaaatttcttttatttgatcaaatattaaatatgttatagtctattctaaaagtacattctacctaaatgaaaatgaagaaatcgtttcttaaattttttttatcattagagcaaacgcacgtgatagagtgcgttatttcactcttcataattgtttattatataagatacgatatcttaaaaaaaataattcattcacatctaacaagtataacacacgtatagatcataaagttatagatcataaagtcttcatgaaccagtttgaagagatgaaaggaaaaaaaaaggaggaaagaaaaaagtcagatctccatcaacattgacttttgagcccaacgaagttgaagaaatagctggaggcatcgacacaagacgcacaatgaccaacgtcgatgactccatgagctgcagtggaaagaatcaatgctggtggctggtgggaggatcgtcattggttaatggtggacactcggagatgaagatggtggctgtagtcacttggagtagcactggtggttgcagtggcaagaagcgatattggtgatgcgtgaagagagaaaagtttttggagagagagagggacttgaactagaaaagagagaagggttggtgggaaggttagagagaaaaattattttgaagagataaaagaaaatgtgatagtgcgaaaggaaaaatcacgttttgcatagaataaatttagataaaataattaattattttatttgaataataattaagttataataaaaaaaatataaatatgtgaatttttgaaatttcttgagatttcttagcttgaagtaaaattttatatgaatttcttatgagtgatatggtattgtgagaatcacaaagagtattataataccacaaaaaaatgactaaaaaacctatattaaaaattatggttagaaatactcttagggtctgtttggatgtaaacttctctagaagcacttctagaagaaaaaaataagaagaaaaaaaaggaaatgagcttctctataaactaaaatgagctttccattaacttatttgtagatgtcatctcattttttaaagaagttatattgatgagcttctaaaaattagctaatggacaacttatttttacttttggagaaactcatttcattttttccttcttatttttttcttttagaagtgcttctaaagaagcttatccaaacagacccttagtctagtcaaatgaacccaaattctaatacataaggaaaaattcaaattatagaagacatttgtactgaaaaaatctcgaacaaattgagaagatcttaactccaaataaattagaaaaagaaaaccacaagtctaataacagtaatggcatagggtaacaggaccaaatatttgttaaccttcaattattaaagttcttaattttttttctgtaataaaaaaattgatagaatttgtcaatgattcaaacgtcacagtgtgcatatataccgtgacttatgagtgctctttctcttcaacgctatctacaactcccaaagcactctaaagctctaacttctaacccctcaaagtcagtaacaccagagagcagtttagaaagaaaattaatctttgcttatgttatctatgattgaaatgatagaaatagaaagtataaaattaattttttaattaaagaataaaagatgtgaaattcacatagaaattatacaattttttttttatatttctctcttcttcttctcaacgaatcacaatattatgttgtatttgacagagagagtaaaagtatgtaacaaaaaaatgaaaataaaataaaataaaaattgtttgataaaagagaaataaagtaaaaatatgtgagaaatgttagatttaaaatagtttgatatataaaaaaagagagaaagaaaattacgataaaaagtattattgtacccttgcattaagtgggttgttatttttattctacggtaacagtaaaaattattcatcaactgattcaactttttcacctgttgagaggtgaaatattgggtcacggatccaccaaaatatttgaatatttcattccaatttcaccgctcccaaaccttcggggctaaaaattaaaaataatataaattaaataaaaattaggtaaatggtgcaatgtgaaaataaattggacatttggggtactcaaacaagttaggtttgggcgtgtttaaacacgcctagattgagtgtgtttcaccatattgtgacacgtgtcagggatgcacaatgttgaacgaacttcgaacggttctaacttttgactggaatgtccgattgagacgaaactggtggtcacgcgctcagaattgagaggagaagccattggcaagtttccaaaggggacttggtcaaaaaaatttcccaaaagaggcctctaagtgcctcaaaaatgcgatttaatctttgaacacccaaaaaatttcttgttttataatttttttattcaattattgaattgcatgctagtgataaatttgcctaattacttctctaaatttcgagcattttgacataaaatccgcctccatcggacatttctatcaaaagttatgattgttcgaaggacatattgtacacctaatttgggctaattttttgcataaattaagatgtaaaaataaaaacatcaacttaaacaatcatgggtgaataaaaattaaaaattatatgcatatttaattatatacaataattaatttgaacaacaaagttaataaaaaattagcccaaattaagtattttttttatatttatttaccaaaattatactgtaaatttttaaacattttcaattcaaaaaaaaaattaaaaaatgacaatattctagtcgcaacacattaaaaaaaaacacaatattcagtaaaaagtgttagcgactgaattagagaccaattagatacggatttttaaaaaatttaaaatgacaatattgtggtcacaatactaatttcaaaagttgaacaaaattatacggtaaaattgctaccacaatattgtcattttttaattttttaaaccaaaattgtttaaaaactacaacataattttgttaaataaaaataccaaaaaaacattacaccattttgataggaatatccgatgaagacggattttatgtcaaaatgcttgaaattcagagaagtaattagacaaatttatcactaacatgcaattcaataattgaataaaaaaaattatgaaacaagaaatttttttggtgttcgaagattaaattgcaattttgaggcacttagaggcctcttttgggaaatttttttaaccaagtcctctttgaaaacttgctaacggcttctcctctcaatttcgagcgagtgaccatcaatttcgtctcaatcggacattccaataaaaagttatgaccgttcgaagtttactcaacactacgtatccttgacacgtgtcacaatatgatgaaatacgctcaatctaaacttgtttaaacacgtccaaaccagacgtgtttgaataccccaaatatcaaatttatttccgcattgtactattacctaatttttttatttaatttatattatttttaattttttgccataagtatattcatgaaaatgtccacatttgaggttgtcgagtagcaaccaatgcgtgacaccaactaatgactactatgttactatctaacgaaaataccaaacatctaccgaagggtccactacattgctgtccatccatgcctacaacgcccatccagctggaatgcccacttctatgtgcagaaaacatagaaaaattgttctacggccagtgacatcctcactttctactcaccaatacgtgttttatgggaatatcaatattataatctaataaattttctaaacaattattacctaatcttgaattaatatcacataaggcagactaactatattaaaaattatattttcaatgattaatcaattaatgtaaagtaatagctataaattattatgttaacaatgaattaaactaaactcttaatattattaatgacttttatatttttctatctacaaggcgccaataaagatcaagcctaagtccccatacatctaccccaatccctcaccctatagaataaccctagtgattttattattaattcttaagtttagataaaatttaaatgtgtttttaatattaaaaaaagataaagtatgtttttaatttctatacttttagtaaaacttggttataatttatgtaatttcaaattaatgaatttcgtccctataatttacaaaataagtaaatttagtccatatttgatctctggatcatcactatgcagggactaaagaaacaatttttaaattatagttgtatagacatcaaattaatcgatttaaaactataaagactaaaactaaatttgattgaaagtagagggactaaaaatatatttttatcttttaaacaatgtttttaaatttttttaagttttattgtttttaataaccatcttaaaaaagtaacacgttttaattccttcatcgttaattggaagcagttttttatatcttttaaatattaaaaataaaaaatttaaacatatcaattaaaaaatatatttaaatctaaaaaaaataaaggtgaaagaaaaattattttagtacattcttttgtgtcacttttatttgttggaatctcttagtatttaataattagtgtaaaatttaactaaactactaatgagctatttgactatactcgtaaagaaaataaaagttaaaatattaagaatttaataatatgagtttttaattactaatatttaacctgaatattatcattcatagttttttttaacaatattatcggtcacaactttattggatttgaatattgttatcaatgcaaaggattgatataaaattttatcatatttatatgtgaaaaataatttatttaacatgataatacatattctatttcattagtgtgtaaaattttgtcattatagcatatgaaataatattttttatctagtcaattgatacacactcatgatataatatgccatccggggaaaatatgcatagctctaacaaaaataagataattcacaatagtttttttcaacctatggtaaaaaaaagaaagtgaatggaaagattttgtagaaataaaatatgagaatatataattgaggcagcagaacaagaaggggaactactacatacaaagtgtcgttttaaattgctttaccttattgagccaaggcccagacagacaccgcatactcctctctctcacgagtcacgaccattgatttctccgcacgttcctctcctaattcccctcctttttcttgctactcttttgttttgaggtgaaaactgaaaactagaacgaagcgtacggagagaagcaaaccaaacgaaaccaatgggaggatgtgcaactaagccgaaggtctccaaggacgataccgatggaaagcccaaggcaccccaaccagaacccaaacctgaacaccaacaacccaactacaaagacacccaaggtgctgctcacaaagaccacgacaaccttaatgtcaacgaaattcttgacgacgaccaagcaaacaaaccacgctctctcagctccttgttcaagcaggtacgctctcaaattccacaatctcaaccctttttcctttttttcaaccttttgtttttagtttctataataatttggtcaaccgtagttaaggtctctaccattaagctggtttacttacaatcctcctaactttaataaacatgatgaatttttcacatgtttttttaagtttgataaccgaattaatgataaccaaattcttcaacatgaaaagggaatattaatcatgtttaaccaaaaatataggactaaaacacattctttttctctttactttttacgtttagtgttggaattggaagtaatattttctgctgccatagaaaggtaacttttttttttatttatttagttgtaacatttttctacgtatatcccatcatcttcatcttatgcataaaagaaagtcctagtcaaatttccccaaaatgattctctgagtccttccatggtggtatttccaatactccctgttccaaaccttttttctttctctagtctttttttaataaatggataaaatggagaataccgctacaattattggattttgttatttgctacttttcttttctggcttgctggacctatgaacagattttcttgtgtcattccgttccatcccaaaaagaaaaggaaatccttacatctttaacttattattgaatactttgtcgtactgattcttggtccacttcatgactttacccaacaaaatcaccgttgtcccggtttaatggctaaaaattttaggggtaactggtaggtacccccaatcatgcgcatgtaaaaggatacaacaatatgttccaaactatttattttagaaataacatttgtattttttttatcacctgactccaattatgatatatttttttttataacagacgcaaggaattagaagcaagagtttgaaactttaatatttatgcactgtttgtgtaaaaaaacaattaaataatgaatcagaaataaaaagtcatgataagtacaattttcaaggtacttatgaaaaaaaatcaacaaatttaccatatgacaacatgtagtattagactatgtacatgtattatttattctaaaattaataattactaaaaaaaatgttatcaatgcacttttcctttgatttttaatgttttcataataacgttttaataaaatctttattattaattttttaactaatgcttttaacaagatctttttttatgaataaatgtttacttcaaatcgtaaatggactttttctctcatttctgttttggtactatttatttttcacttgtgtgtgtggactgtggacaccgattatgtaaatattgcatttgattgctttggcaagcttctctttgtttttgaaagattcaatcagaactatcacaaaccttacagcctctttgtttgggcattaaaatcaagtctcatttttaaataaaaatatatgttttgatgtaattgtaagatgaaaattaatttgaatacatttctttagtacgtagtaaaattaaatatactaaacttggaataaagtcggacggcgaatacatgacaaataaacgtgcgatcccctggagtcccctaatcgtttggatccaattcatcacgtttaccgctatcatcgttctcatgctttcattataattaattagtgtctccattcagcagaaacatcaatgatttcaaacaaaaggttattgatagagttttgcagtacacattgattatgcggagtatatgattttattttttctatatttaaatgtttatacaagaaataataaaacagagaatagaaaaatactatttattttatataaattgttgaaacagtggataaagtaaaaattaaagtgatgtaagaataaaaataaataataagatatgaatcatttttaaaaaccaaactaccttatttttaaaaaaataatgagattattatagttccttttttaacaagaacaaaaatattcccttaaaaaaacaaaaaacaaaaatattaaaccaaaatgacatgattggtggataatttttttaaacatatggtcataaatttgatctatcaagaatacctgattttttaaaaaaattaaaaatattaaatcgtcaaaagtttgactatgacggaattggaacctccacaaacaaatggacctagaaatattatgatgtccatatgcatggtaggtagtgtgggtcttcagtcccgtacatataatgcctgaagtagatttctgttattggtattaattagaccatggttttccctaaccggatttttagcatgttttgcctccgaaattagaggccttgaaagttgaatatgactagttaaatttgtgcccgccacaaattccggtgacttgttaattcctctgtagtagtctaaaaagagcgtgagaatctccccaaacagagtatgtgaaattttatgagtagtaggttaaaaatttcattgtgttcagttgatagaatctcaaccaaagggagtaaggataggcatggcagcatgtcccaaacctgtgggtactcaatcgaattcattccaattttagtgtgaaaaaatcaagttaatcgaatttggatttgtgtttaagttttttcctgaactccaaaagcggggacggagtgggtatgggtttactgatacctgcccccgctcccgccccgtaataaataatattaaaaaagaaaaattattttataatttttttaattgaattgattaattttgttttgtaattttaaaattatgatctcatattttaaatgtgattttgttattgtttttttgttacataattagcattttctttgattttttaaataaaaaagttattttatttatttatttattttaattttaatcaaatagcgagggtgggacgggctgagaaaatccaactctagcggagatgaggactgggggcaggggcaaaaaacgggttttgaatcgggggcagggaatacaatacccacccccgccctgtcattttgccatgtctaatatataaggcagtaagatgacaaagtctgtccaccaaatctttttaccccacccccaccacacacaaagaaaccagaataaatgtggcactcattgtcaaaattaaacaaaaaaacaaactaaaaactgtaaatatgacatttttttatctctttaatttagattgagtgtttggttttatattggttgaaacttgaaagttaccacttccggtcttttccgttaacttggtttaagcattgatatgatgaatgaaaatatcaacttattcatgatttgctcgtgttcttgttagtaaatttaattataatacattattcaaattttgaatacatactgattcagaatataaaggtaagtttggaagcacgtattcatttacccatcaactcttccgcttattatttcagttacctaacacaacctcctgaattcaaacataattgtcgacccattatataaagagcattcctgaagtttctgaaccagaaagaaaaaaaaatcattaccaaaactgcatagtaatacagtaataaccatttttaaaaaaagacagaagatcagaacttttgaatttatttcaataagtttcacatttaagatcagacacaaattttatttcataacctttttatcaagctagcgcttaagttattcatgtacacccaaaatctattttgatttgtaaaagaaaaaaaaggggaagtaaacagaatgtgattactgcttggctcggaagcaaagaaggaatatgaaatatttctgcatcagctcctacatgattgtattgtatcaaccaaactagagactatttagtggcaacatttcttgctcgaagcttattcattaaagcctttcttagcactctctgatcttttctggtttatcacttggtgtgtgtgtgtgtgtgtgtgtgttgcagaatgaagataaaaggggttccacagaaaatgagaaaaacacagttgaggagtctgtgaaagaagaagtgttagaggccaagaaacctgcggaggatactaaaagcaatgagccaacagttaaacaagaatctctaaagccagaggagaagctgtccgaggagagtaaaaacaatgaatcatcaaaacaagaatacgagactttgaagacagaaattcatgtcaatgaaccagataaggaaacagtgaaacgagagtcagaagctgagaaaccttcagaggaaactcatatcattgaaccagttaaggaaacagtgaaactagagtcagaggctgagaaaccttcagtggaaactcatatcagtgaaccagctaaggaaacagtgaaactagaatcaaaagctgagaaaccttcagaggaaactcatatcaatgaaccagtcaagaaaacagtgatagtagagtcagaagctaagaaaccttcagaggatactcttatcagtgaaccagctaaggaaacagtaatagtagagtcagaagctaagaaagcttcagaggaaactcttatcaatgaaccagctaaggaaacagtgatagtagagtcagaagctaagaaagcttcagaggaaactcttatcaatgaaccagctaaggaaacagtgaaagtagagtcagaagctgagaagccttcagaggaaaacggtcaaagcagcgagtcaccgaaagaagaatttttagaagccatggaggcactttcagaggaaacacaaagcaatgaacccatcaaactcaaagaagagcctattgaaccatcagaaggaggtaagccaagtggggaatcagagaagaatgcttcagaaactaggactcccattgtagagagcataaactatgaggtggctcctatgcctgaggagagagtaattgaagaaattccaactgttgcaaagtctttagagaaggtaacaaaggaagctgcatcaagcacagaagagaaaagccataatggagtggagaatgcacctaaggctgttgatgctggcgctgagattcactaaaacctgaaatctgaatgagagccatgaacaatttgaaacattgcagagtttcagattgttctttggttcatcccaacggaatcattgtgtgagatttcccaattacattttcctcgtgttattcttttttttcatatatagtttgaagaaccaattttttgttcttgtcaagtcactttttttgtatccaatcattgcttatctgtattggtgggtcaaattcaccaacgtaaattgtaatttttttgtgattcctgatctggaagtgggaattccaaggacctcaatttttttttattttatatatatatatatatatatatatatatatatatatatatatatatatattaccgtcaagtaatttgtgcaaaacaagtggtgtacaaatgttacatgaatcacactgagcaaactagttatttttggttttcaaatacacggaattcttatctctatctttacatggaatttgttttacggaattgattaatcgtgggaatgttattaatgagaaataagatgtttagtaaatatttatcattatgtgaaatattttattttttaatttaaaacaaaaacattaatgaaatagaataagaggaaagtcaaaattttattctcatggaaatacaagatgtcaagattcacacccttttacatcataataagaaaatggagaaacatataatataataataaagattcctgacctaaaattattgattctgatccttataaattttaaaagttttgggaatattatctattaccttgttgattagcatattgggaagtataaaacttctttgaaaggtccttcaattttggactgattcctttataagataatagtattaagcctcctcttgttggccagaagctctagcatgaatttggtatacacaagtatttgttcaagtgtcttaaaaaaagggtatttatctgcaacttcttaaagatctataaaaaaaatcccattatgcttaccattttgctgctgcttcattctgattctgaagaatgataacttaatgacatataagggcagtttctccttctttagagcaacaaataactttttaacttccaattccatcgcatgcctctttttctaaggtagtggttcaatgatctttccactcctagttgttataagattaacatactcattattactactaaaattaggattcatgtcatgtcatgtcattggacaaggagaaacctaatttatgtctctaaaaaaattacttgtctatctctccctctccctctcttgtctttcggccatcattgtatgtgtctccaagtcttctggccatgagtgcaccattcgggagacaggtgttaacctttcgcgtaaaacccaaaatcaaattggcaccatggaattagtactgtcagctcaggctaagtgggattagcttatcatttactccctccattctaaaatgattcatgttcatactttttaatagatatttaaatatatattaaaattttatcatgtaataaataatattatcttgaaagatttaataatatattattaaaataaaaataaaaataagaatattaataaaattattttctaataaatgttaattcttttagaatatttgtgtaaaaataccttaaacatgagtgattttgaaattgagggaatatcacatttttaatttcggctgaactgatttaacagttggctgaaatattgttggtccaatctaattcttacatctagctaattgggtcagattttttatatataaataataagcatataagattatttttatataacaaagttaataaaatatttttaatcaatgtaaattaaataaaaaatttagcttgttgtttatattataaaatataaaaatatgatgcagtacagaataataaaaattaaatagaatgcgtgaattgtgaaatgctagcaaaatatttttaacacactttttatcattaattattttttttgaaaatcacaaaattgtatgatttcatttcttatttaataattctattttataattttctatcaattttaaccaatataagaaagtatcttactggcactcatattttagtaacaataaacaagtgttagaaattaaaaacaaaactcaatgtacacaaaatattaactttaaactagacattaacaacatgtgcagtatttaatttattatttatgattttattatttataaaaaaaatgggccaaagaactggctcaagacacatgcatgaacacccacattcactgtagatttaatttcttttactctccatcaatacatttgtagtgtttgaaattttaaagcccatttatcttaaaaaatattttttgtttttacttttaattgcaaagttttcaccttgttttcaatctattttctgctttcaaaaatttatacagaaatcagtgaaaataaaagaaaatttataatcactattttatgtacaaaattttaaaaacagaaaattaaaaataaaaataaaaataaaggtgataggtttgtaaataaaagtaaaaaaataaagataaataggcctataatttttataatttcgtgttaaattcttgtttggtccctatatatcaagttgtttttgtttcaacatccccttaattttggatgtttttgttttgtccttataatttttggtgttttttttttgtctatataatttttcccttaaaattgacgatccaagaaggaccaaaatgaaacaaaaaagttttacaggataaaaataatatatatatatatatatatatattataaaagaatcaacagcaaaatcttgtttgattgtcactaaagagttatttaagtattaaatttaaagttaattttaaaattttaatttattttttatttttatatttgatttaaaagaaattatctgactttgctttaatcaacaccactactatttttttatgttttttttatctgtaattttttttgtgtgtataaaagttacaataaaattaaaacttatgacattatatatattatccaaatttttcattaaaccaactggactaggtattcatcaccgctactattattacttgttattattatagttgtgtcactgtcacatgtcaatattatgattaatgttatcatcaccactatttatgtatatactaaacaccacatagtataatcttgtgattcaatttgtcatattatacttattttggttttatttataagagttaagtttgaaatgatgtttattttttattataagattcaatttataatattttttatattaattatttttagactaaaaatattttcattaaaataagagaaagaatatactgataaataattagaagataggaatattaatgacaaagatatatttgaaaaaagttataaaaagataaatttatgagtataaacttaattaatcatttttttaatcttgatgaattatataattggatcctatatataaaaatataaagaatactatttttcaatgtgcatcaaatgtactcttaatttcttatttatgttaaatgtttatgagaattttttttattataatattattaatacaaaatatttattaaccttttattaatgaataatcttgattgaaaaatctgactaactaaagtttaataagtctcctatctcaaccacatttacaaaaacgttttctttaacgttaaatgtcaaaacatcacccatttccactgccaatcctgatcattatcaagttttatactgattttcaactgcgggagttgtaacacacccatatatttgaataaccaacccaatacaaaagagagaaaatttaaaagcctagctagttcctacgatatgaagccattacaaacctaatattatcggaaagacataattggcattgactcgtgtttctgccgagaagaggttgtcgtcggagattctgcctttggattttggaacatctccacaggcttaaaaggcttaatatattattaacatatattcgggactatttcaaactatatacagttacttacaaattacaaccatacattttatgcgaattaaaaagtacttgttacttatatatcaagtgtcatgacaattgtgatttgtcaatcactccactctaacccgatgatgcctcctccaagtctaacgaggcttttggcatttgctctctgctctttccccacagaacgcagtacagtccaatgaccaaagcgatgccacctaaaagactggtcaaacaacaaaagcaaccacatagttaatttgtatataggtacttagcaatgtgcaattaaagaagaaacaaaatttaagtttctttatttaattaattaaaggagaatactacctgctataaatacaggtgctcttaagtgaacaactgtacaaattactttagaagccattagttaccatcggagagcttctacctatgatgactttaacttcttactactttttctgaataacacgtgtataaactatataatgtgtgatgttgtctcaccgaatcttaggtataacaaagggaaaaattgataaagttgttgagttgaggtgaaaaattgagcgttgtatagtataacaaagtgaaaacaaagtgtgattggaaagtgtaaaaagttatgcaaaattaatttttgcaattattgaaaatagcttggaggaagtagtccttacaccccaatactctttagtccttttttttcttcactttctcttttgttcatatctttctcttcgttaatggagtatatgcactaaaaggattgtcaaactatcgttttactaaatgtgatgggtgacatgggaaaggaaaaataaaaagggagtaagcattgggatcagggttgaaatagatgaataaccttcccaaagttatgatctcgcccaagagaattgcggaagagaagatggtcatgatcaaagccagtggtgttgccatggctagaaacaccggtcctttcttctctataacccatgtttgtaagtaatatgttacgccagtcaccataattccctagcacaatatataaattagttcccatcagtcttacaaactaagcaggcctaaccattaagtaattaaatttatatagtgatttttgctttcataaaaaaatattttttacttagaaaaaaagatgatcatcaatttaattatgaagaattaattagagaattacacaatacgctacggccgggagtctgacattccaccccaacttccattgctcaatgtctctttctacggccaaggcaatgcccaaagactgaatcgagcttaagaaacactgaagagttgtgaggagcaactttgaagggtacccttttatgacataagtctggtcaattaattaacaagaagaattttaattaatgatatgaataatattaattaggaaatataaggtgtttcagatgattatgagagaaagaaaaagaaaagatcacatattcaattcctctgctaataaaaactaacaatactaaaagttaacatttgttaataaaaaaatgaatcatattaactaggatatgatgaatcatgaattggtaacaattaaggtacagggaagaaattaaatttacctgtagcacaagccacattccccaaaaggtgttggagaggagcaagaggaagcaaccctttatccatgacccagatgcaacacgacccagatgttgttggtttttatggtaccctaaaaggtgataatggcttaaaagttccaaatgaggacctttatagaaagcaaggattgctgatccagtcaagcatgccactacaccaaccaatttagcaaccccgggggcactctttactttcaaattttctatcctgaaataaattaaaccaaattcttatgtgaggtataataacggatttagtgaagattgaaacacctaataaaatgtctcggtttaaattgatccattttgttgtggttgacacttaaccacttttatgatgttttaaaacacgttaagaataaagaatcatttttaggacgtgaaaattataattgttaacttctaaaaattatatctgaaaggtgaaaccaaacaacctatttagtaggatcatatatattcggtattgcatggacatagatatgtaaattaacgcacgtgtctacgtacaacatggactttttcatcttttaagaaattgtcgtttcccttgacaacaaacaaggcacaaccatgcatgatagcataatgtggctgcaaaacctgagcacaaacatggaccttgttagctgctactaactggtccaatatctgaaagttactcactacgtgcacaatacattccgaaagctgaacaatcaaaatgagtgtattcactttcagagttagaaacgccaaaagacctagtcagagcaacccacaattgtactaaactaataaatgttgtcacaaaattagcatgaaattgaattttagcctcgtgaccccaaagtccaaacttcatattctgaaacaaaaaaaggcctatccattcaatgaaaaaatgcagtacaatttcaagggtcgtttgtctttgaaagttgaaagtttcgtcacccgacatgaaggtaccatcaaaaagcctaatttatatccgtgtctaactcctaacccctacctgtctattaccttaattatatacctgaattcaagtctttgctttgtagtactgagaagagaagtgaccacataattacattttgctaggaaaaatctcctctgtaaaacatgggcgactttcttttttagtagcaaagaagatattttaatttaatttgagggagtacaagtgttcttcctggcattttttaaacttatccttctcacccagaatattttaatcgctagccactcctatatctcacgtctgtttttaatcacatgtaaactttaagagagacaattgagtgcaaacacaattagagatattttggtagctagacatcaaattctattcaacatttaaaggacagaagagaaagaaaaaaaaaagtataataggttatatatgataggtgttgatttttgatataaaaaagatatgtataaattagtactcttccgattatctcttccttttaggcaagggttacaattttgttccattttagtttttggtaacaagatactttgctagatatacaattgtttgtgtttataagaggacacttacactaaagttatgatttatgaaccgcttttaggtgcctcaattgtgttgttcataaagaatccatgaatcttaatcaccagcaaaatctccactggtgatcgaacaatatttgattttagtatttgacaataaaagaaacgaacacttcttttctttttataaattgcggttttcagatggacttaattaaagtccaatttaaggttgagttagggtgggaaagctaactataattgaatttaataaaatacaagcaattaattatatatgagcaatattctacctgagtatgagcgccaagaagaaggtgatgactggaaggcaatttgtggtagcagcagctaaagtagcagaagtgtaaataagaccaataccatagatgtccaaactcgcagtaatcctgaattaaatttttgataacaaccaccgacagttttaatgaatttaaaaaaaaaaaatcaaacaatagcatcatgtgaatcacattttaattgaatatataacgtaaagtttaaacctagctagctttatatttatagcagtactctccaactttggtatattaggatctaatcataatagcagcaattgaatatatatgtggacataccccaggaaagaaaggaaaaagatcttgcagaaggtcacgaaggacaaagggggtgcagttttcctgctttcatcaatcaaaaatcgaatcattagctagctagacatgtatatacatacatgatacatgtatgtaatatatatgttcatgtgttgatgttagttgtgttgtacatgtgcataccattcaaagaagaaagcgaaaggaataaggaatatggtggctgcggtttgtctatagaagacaaagacgaaattgttcatgccatggtcaaatgcggcttttgagagcagaaacatgccagtatagatggcttctatgaggattgcaactagatagggcttcttgtttcctttcatggtgtttttgggtttgatttatgacctaatttaggctccgaaatcgaatgaagatggttcacagtagttgattacacacaatcaagttccaccttttatgggcaatggagatattggaaagtagtgaagatcgagcacactgccattggctcttgatttgtattatggggacgtgtgtggtgaagatgataagctgttttacatgttcggggaccactcctctctgtactactactatgtcttagacgctgtcaagctttcatgcatttaatttcgtagtgcactcgtactcctagaccctgtatcaacaaagttaatgtcacattttttgtttttcactcacgtgcaatttttgtttccaaaatcatttttatacacctcaaatagtaatactactatatattcaacattttagtaagagagacaaaagaaaaacagaaaaaaaataagaatatattattggaaaaaaaactcacttcaattagtaataacttcaaaataatatcattgatattcttggtctatatgattattgtcgtaattggaactgaatttaaatccggccggcggtcatgaaacttacaacaacaaaaaagttaaaaataatttgtacaattttattaatcttaaactcaacttctaaaatgatattaaaatttattttaattatattaacatgtcatttatcatattattcctatagtaagcgtataatcgtgtgttggttactatgtttgtccaaaatctctattatgtttattttaaactatagtattcgtgtacttcaaagttatctccactttctaactcattctttatttttttttcccctttcacgtcattcataaaaccatctcgttttttaatttctctttcctttatatctatgaaggtgtatgttggagtacacaaacatcaattttcctagttcgcttttgcttaacatcctattaaggggaggggggtggttgcactcacattttcctattcacattcctttctagtaattattattattattatttaaaattgatttattaaaatttaattaataaattttcgaataaatatattaacgttttaatttatctattttatttaattatttaacaacttttaatttcataaataaataattttagttaagtaagtgcattttattataaaatttggtgtcacgttaactgtttgttatatagtcacgtgtgcctttaaataaaattaaaagtatatgatagtattaaactagctagtgagtaatcaaattaacactaattagaattagatggtggttgagctcacggatcgattttaacttttaaagaggcatgacatgattagctttagtcattacacatacgtacacttctcataatctgttagtattacttcggataatgttagctagtattcttaattaattagagtattaattaaaaaattaaaagaaaatatttatcataaaaatcatatgtctgaaaaattaataaataacatatttttatatatctcaataaaaaaatattttaagtttcttaaccattaatatcataatgcattgattaacatttttctttatttacccctgcgatgaaccccatgtattccttagagttagaggcagctcttatctctttggaggacacgaacggaaaacaaaaaatatagtcgttttctctgaaatttctttactcgactggcgagaattaagtaaactggattcctacttttctaaatttattttttatctttttaactaaaaattaatatcaattttaataaatatcatgcaaaaatcataaaaaaaataattgactgcattaattaagagcatttataattcatagttatttaaataagtttttatcttaagctgtgagcttgtataaaaaaacatcacatcaaatactttaacgataatatttactaattaacatcttatttttaagtaattgcattgcagatgttctaaaatatttttaaaatcagattggttattgaattagtattagtttaaggcttaatggttcaattgtggttgaatcaattttatatttttaatattatattgtattttaaataataatataatatagaattataaaaaattataaattaatataaatgactaaattatatatatattataagataaaaattaataatagttgaaaaaaataattgataatcatatgaaatatttaagtgtgtatttgatttatctgaagaatattttagattaaataaaaaattagaaaactaaaaaaaatggaaaaattgggaaagatcgatttaatactaattctctataacggttcaacatcaattaaccggttcccgattcaactaattcaagtgttcactctgatatatcttttaaaacactagacttctaatcatgttttgagccacataaataatgcagtctaaccatagccatataagtagcggatttgacatgaaaaagtgtatataggtgtatatattgctagaatctatccaaatacacactaatgatatgtttaatagattaagggtccaattcatttaactcaaaacaactgaataatttgaaaattagatgaaaagcaatgaagaatttgttaaaacaggccaaaatcattattaaattaatatgcaaatttgtttgaacttattattttaacttcttgcaatttttaattgttttattcaataataattaacaaaaaaatattgtgtattaactgaaaaatgtttttcattatgaaatatatcaaaagacgggcctttaatttcttatatataaaattggatattactgatcagtgagattatcacgaattatgttgatcgagtttgtgatttcttattaacttctgtgaatgaatttaagtgtagtttatcttgttacttttattttacttataatgagttcaatcattgaactagatgcaactttaactttagaacaaataggctttcactttataaacatatacgtcgcgtacctaattgttaatagtgatcagtcacaactttaaatttttcttatacgggtaagaattgatttattttaatgttagcggcgtctgtttcgagtcatgcaaatttatttcttggaaatatatcatttatgtgtttgatataatttataaaaattattttcagaatctatttctaggaatatatattacacacatgattttctctctctctgtttcgatataaaaggatgggaatccaatattctcatgaaaataaatgttattttttaaaataacctcccaaattcactttattttatttttaattaaaatatattttaaaatatttcaaggaatgttaagtggttttttttgtgctgaatggaatgttaagtaattaagtagttaccaaacacgttggtggaaataaaattttcagtcattttattcacagaatatcattctcaaaaatataatttagttcgttaaacaaaaactccgttagtgtttatatttaaacttttgtcatcttcctttcttaatcaagttattagctttagtggaatggaaaaaaaagaatttattttagatatcttatttattcatattcaataaaataattaaaattctcaccccttccatccttcttcgaccaggccggctctcccttttgatacatttatgatttttttttttccaacagcttttcataatacatatctaacatgtcgctagttttattggaattaaattcaagtagtcgaatcatctatatgaaaaaggtcttcggtttaataccggattacttttttttagaataagataggtgtcatttttaatttatattttaaaatttaaatttgtttgaattaattaagcttaagatttttacaattttaaattccttttttcgctttttgtatataatttttatattttagttgaattaatcacccacatttttatattaagttttaaaaatatattattaatttatattaattcaaaattatttaaaatcacattcatatatatcaaaattaacataatatatttttaaaatatataaaatataaataatttgattaattattattattattcaattttaataaattttgacaccagtaattaaagtaatatataattataaactttaattaaacagttgaatcaataaaatttataatttatataaaattattaatagtgtaatattctcattgaaatatgatcagttgacacctttagtcttatttttgtcttataccacttcacaagcataggatggtgtttggtgtcaaatatatcttaatttgtacttatacaacttaataatttttttgtataatatgaaattaattaatcaaaccacccgaatcatttgatattatctttctatgatgtgtataaaatttcgcataaattgacatttattaatatgttatcttgaacatttgtatatattttaatccctaaaaaaacatttatatatattttaaatagctagcataatgtctgtcaaaataaaataatacaatcaatcaatgatatacatttgaatgttctactgtttacaactccgcatcggtcaaaagtgataattaactaaattcctatatttttcataatcttgtatgtaaaattagtcgttacctactttatttttttcccctacacatttttttaaatcacattccctacctaacagacaaacaatacgtccatcttaaagtactaaaagttagtcttggctctgatttgactatatattgacctaggtctttcactaacatacaatgtttgtcttgttaagcacttacctcctaattagggtaagtaaactacttgttccaacctgtaaaactattcttgttaatctgcttctagaagcatgacataagaaaagataaagttattgcagtaactaaaagcatttctcgatatggtaacatgacgttaaatttgtatccccgtattttagataaatgttttaatatgtacttgttgaaaaagaaaataagaaaattaattaattaatttttttataaattaaaattagctcatagtcatacaaaaatttaaaaaaaaacttttgaaaaatgttaattgaaaaagattttataatttaacttatgcataatttacttttaatttatcagaaaaacttattttgttttatttaattttcttttccttcaagtgtttattgagaaatttatgatagagtcttaattcattctaattcaaaattaattgaatctaactcagttaataaaataaaatgaataaattattataaattacttgatatttgtttttaattcttataaataaaaaaattaattaaaaaactagttcattaatagccccacaaatgcactggcccttaattcctgcggtatgattattatttttttctgtattcctcctcgtgtaacatttgctaacacgagaaaaaaggaaagaaaaaagccggaggctagctactttatggcaaattcagcaacgagtctaaattacggtgcttgagtctttttcacacgtttgtgaagtagcttttggacgtagatgaaaagcaaagagatggtgatacgtcataagtgcctagttgcttttccatgcagacatagatgggatttgattcataaattaatatttcacaaacatatgatgaaattttaaacggagaaaaagctgcaacgcgcttcctagaggaccatttcttatggaaggaggatattcccaaaatggctaaatccatattttggcaatactttggattttggaaccataaatactttcggctacatttatctacttttatcaatctatggcatttaaaaacatgcatctaatgccatatactcctaaatcctctcaacaaattcaataattaattaagctctgaagcagatatattttgtgcgtgtattttgtagttttatatactcaaatttgatctattccatattcaccacccatatttagaatctatattcatgtatggagtgaattaattagttcctataaaggttatccgtaagaaattaatatatatatatatataacagaaaatgaaattatagttataattatttttaagaactaagtttaggtacttttcgcgttacatattttcaaatcaaaattagaattttatttttaattgttttaaactaagtcagaaatcatgtatatctttcaaataattggataaaaaactaatatcactcgtgatgcgatactacagttcatccaataaaagttttcacatgaaaaaaataaatacaattcttctatagatcattttaaacatataaatgcagttgggtcttataccattgcatcaatcctacaagttaaattagaattttactttagttgtacatgcaattaaaaaggcttaacaagataaatctctaattctaattagaaaacagcataaaaaatggcaaagagatcgactacccttaaattctaatcagtgttatgatattaatcttttagttgaacaaatagatggagttccccgcatagatgggattccctctccctcaaaaagtaaaacaaagaaccttgtttcatctcccgttatgtctctttgatgggaattgattagaggttataacaagaaaaggaaaaacttaggattcctgatatgtccctttactcaaatcacgcccgctttaagcaaattatgatacatatgataaacctttttattatttttgataattatgtaaaacctttttccagtgtgaaacaaactgcgcggttaaagctaattagtcaagagtcatcaagatccgttgttaattataagccatttattcgagttgttaaaatggaataaagcgacagataagtagcacattgagcacatgcatgatcaatgatggtagttacttaggaacatagttttttttttttttttgattggtacttctgaacatagttgagaaccccttttctacgaaagatattcatagtccacagtccatatgaattataccacatgcaccctttcttctcttctacgcaagtggcttctctaaactgtgtatgtagcctgtttgtttttcttggtcctacgtactatagatcgatctcaacacaattaaaaaaatggaaccaaagccacatgcaacaaagaggagttcaattattaagtaggcttgtcgcctgttaacatcaaaatattaaaatttcaccatgatagcaactagctacaatgaacatgcatgactttaaaaggaattatttcaattcaattaagcacttcactcgtcaaattaagtccactaaccaattgtttaatgcaaagtttgcgcacttcccacactattcgtcccttttcaaattaattaatgatcaatgtgcttgatatagtagatttctaggttggattgctccattgtcctttatccttgctccctaattataggttatggtatatgcttttcctccattcccttgcaacgttaatcatgtgggtgcgaatactggcgtgacgaaccctacgtgattgtcctaaatctaaaagccatactctacatagtccagacataagaggatctttgatgcattgaatcattgatataggacatgaaaatcaacgcattccaaattaagattttgtcaatgattgaaggcaactgtcaataatgcaagggcaaaaagcaagtatccaattgtattatatttgattatttgcatagctagtcacatcttgtcataatattctgtttgataaattatatttttggtcattttttttttttacaaaaattggtttgatctcttaaaagtttgaaaaactttactttgatctctaaaagtgtcattttgtgtgactaagttagtcactttatatttttcgtattcattttttggtttttcgtaattttaccataatcatttcaattcattacaaaaatcatactgaattctggtgctaagtacaccaaattaattattttattaattatgaaactgtaaaaaaatataaaaaacacaattttcaatgcagaaagatgccaagacaagctcagtctaggaaaataaaaagacacatgtattgaatttgcaattgcagccgtaacatagaaagtaggatgtgaataatttatggattgggcaattcagcttcaataccaccatgaccatgcatggatatatatgtggttgtctcaaggccaaggtgtcaaaacgttttgaacaatttcctttttgtgtttttgaatttgaccagagatggtataatactaaatactaatggaaactcttctataagcaattgacaatttgtggtccaagagactacaaacataatctatgccgaccaaattgtatttgccaactgccggaatatactaatactcatacttccatcttccaacacggaaactgattcccttaattcacatgttaaactattctctccggacttggatataaatgataaaagtttcttatttttttttaaatataagtaaatctaaattatttatttcttatttaatgagattatatttaaaatttattttatttaataatgttaaaaaaatatgtttgatatcaagtttcatgaaaaataatttaaaaaatatatttttaattaaaaatgacataaacaagttaaataattttcttaataagtataaagtatattttttttcttcttataatcgagattggacgaagtactttagtgttcctatactccttccgatctcaatataagacaaaataattcacataatttaagaaagttaattaattacatttaattacactaattacaattaaaagtaaagttttctccaactcacccttcattgcaacttagtatcaacaataaaaataagtcattaaaattaaaacctcaattaaatgaataatattttttagatagttacattaaataagataaacttaattcaaattttattattgaaaccaaaaaaaattcttatattcaagaccaaacaaaatatatataaaagtttcttcgtgcttatactctcttcattctttcttattcacttttatttgaatattctctttttataaagtggtgaatctcaccctcctaacatacatatagtatattttcttatgcttttaaattttaatataaaataaatggtttaacaatatgtaattgattatcggaaaatatgtattttttactcaagttatatatatatatatacacacacacatatatatatatatatatacataatcttcaaaacttaaatatgctcataacatatattttatacttttaatatcaattgaacaatttaacttagtttttaatttatctctttcgaactatcatttttaaaatctttataaagtgaatttgaatattttttaaacaaaattagcaacgattaaaaataacaacatacattatttatcataataatataatttatatatttagaattataaattttagcatataaaataaacacttatattatgtaatgcataggctaaaatactagttattctatatttttctaaatcattctttatacttttaattttttcattaaatgcttctaaaatttagactaaaatgaaaaatattataaaaaatttaaatttgtaatttataagtgtaaaattatagctacattaaattaagataaaaaatcataatttttattttaacccaatttaacaataaaaaacatgtaagttaaaaagagagaaactataaattttgttgtattaaaagatttaataaaaatattccttaatttaatatcattgagaaatttattaattttatagtattaatttgtctattgaatcttaatttgattttgtgccgaaatggaataaatatataatccagatctaaaataaaactaatctttaaaaataataatcaggagaatattatatacgaatgtaaatctttacattaaataactaacgtacaaatttatttgatttttagtgaaatttatgaaatcgaaaggttgttatcatgtgatgttccacttttttttatactgatgtgatgttccactaattcacaataaatatataaaaaaaagaaacattaatttcagcctcgaaaaatactcctgactatttgtaataaaaaaaaaaaaaagagagagagagaagaatactcctgattagaatgataagtacttgtaatgttgatttggtcctgaaaaaggttgagatcaatttaattcttcaaaattatataaacattaatttagcccattattaataacaaatagctcaataacgtaatgctagtagtaatgttaattgcatcaatgacataatgctttcgtgtttagtccgtgtaaaaagtaatacattaataattgctacttctttcaaaaaaaaaaaaaaatactactattttttaatgaagaacatagctcaaatttaggatctagctttaagtcatttctattttcccactgaaacagtcgaatgtaaataactaaataaagaaccaaagcaatacaatagattgaatctcttcttttatatatataacaaaaagaatacattcaatccctcatttcactttgtataggtgataagaagataaaatagaagagaatgaaagaaaaagatacatgatactattatttgaattttacaatttaagataaagttcattagaaaatgatggaatgaaattcattttatttcattatttacaatcatttttctttttctccaatttgggaggaatgtaatagaatacaaatattttattatagacctttttaactttattatgtcgtacgtattagttcctgcttctcacccctctttttgcatttatattttatgtaattatgaccaaaaaaaaatctaatgaatgaatatatatttaaaatagtatttttgttgtgtattacactggatatatatttatttgtatataattataactatatgctttaatagataaaaattttaaaatttaaaattatattataattaaaattcatagtaataaatattttaaaatatataaatcatattttgagcttataacaaacaattcaaattacaatataaagttatcttccaattgaaactgatgagcaattaagtaattcaagtatgtggataaagtaaacgaatgatagtttaagatgattaagagaaatatttttcggctaattgtagagatagtatattaaatgcacctcccaaagacagaatgaagtaatgataatttttaattgaaactttgaaagaatagggagtgggaactacattctccaagttaggaattctaattaatataatatagaagtagattacttttaaaaacaccaaaaattaaaacatgacagaatgcagatagtctccgaccagaattcactccttatccttactaatctaccttcctacctacaataaatataagggttttgataaccaatattcgacattaattaaaaaattaaaaaaagaaaatatttattatataaatcataaaataatgtaaaacatatcatgcacacgtaatttttcacctcctgataaaaacatttatatttcaagttttttaatcttaggacactgattagcatttccttaaatatattttccaaagaaaattccttcttggaattggacccaaagagaaatgtccccccttttacatgctatttatttgaaaaattcgtccaagcccaattcatgttagcaccgaaccaacctttaaaacagccgtatatatatttatattttcgtccaaatggatgcctatataaactggcgaaattccgaggcgatatcctatgagtttcatattttgacttgggttataatatttacatacgtaatttgctttaaatttctaacatatggattcaattgcttttttcgtttaccatccatcacaactattcatgtttttgggtgacaataaaaaaagaatgtttgaaccaaaacataaaataaaataaattgaaaatacatttttttcatcaagcagaatcttttaattagcagctaatgggttcaatcgattcgtctaaattgtttataatttgtagtatcattggataaaatgatattgcaaaatcatacaactttataagccagtatctaccactgaacataaaatgtcatctccacaacttcccctttggaggtggcacatgttaattacaacttcctttcccagtttcacatgatcaagacaggctaaagaattatttgaagtctaaataaagtcttgaacaaaaattatattaagagcttttcaatatataaaaaatatttttcaaatctgcttaaaatttagtaatcttgtactttataatgcaaaatcaactattgaaatttagttttaaaaaaatacccattaaatctaataatcaactactaatgctgtaaattacagttgaaagacacctaaaattctaaaatatatattgtttgaaaataaagtaatacatatttacaaaagtatccttaatttagtatcaactcttaattactagttttttaaaaattgtttacaaatttctggaagcccacaaaagtagggccttaacgacccagtttatactaccgtaatgttcctcctaaaagaaacagctgcacactcggccactcgggtgatgttagcaaccgaaacaataaaaagtccaaaacgtacactttgacgcaagggaacatgatgcgcacatgaattattaattgaaatgcgctcctcttcatttgttgagatcagaaagatcagttaactttctacagttactaaggtcccaggccggacaataatttatcatagcaccaactaaactaccccacgaccctgaccctgaccctgacccgcacccgtgcaaattaatagtgctagaaagtagtcaactcttgacttggctttggatatggcctcaagataagaacaaagacaaaaaccaagctaaaaattccttattggagcagcaaatcaaacattaaccataccctcaggctccacccaaaaaaatcaatggtttaaatctccaaaaatcatctcccctccctaccatactcgttaagatgctgaaatcatcatgtgtgctccgcaactcacccacatttcataaaaatcatagtttggcacataaaatattatggtttttttttggtttgggaaagcggggttgatattaaataagtaaacataaaaccataaggatttttatgttggggagtaaaattgtaaagggatcaagcggatttttaggactgtgcggcatcacccacccacaaaaagcctttttacaagaaagttgccacgtacattatgggtcaccactcaccagtgccttccctgaccagtgccgcctttgttttttccaaggaaggcattcttgggttttggtaactcgtggagatccatcacttgaatcgttctttgctttttggctggacacccccacccccaccccaacacagacaaaatagcagtcagtatacatggaacaaagtaccaagtactaagtaacgaaagaaacaatacttagtacgagaatgtaaattaaatgaagtaaaaaaaacttcaccatttgcagcctctttgtagttctcttgaagccgttttctcgctgaagcaaatctatccgggtcaaaattgccttctctctgtctctgcgatcattcaaagacgagtcaggacaactcacacacacactgatgatcctgcataagccctacacaatggagctaagctccacatttattgctcattggttttaattttaaatgtgttagtgattatgaagcaacaacctccaaattttagtagtagccacatttagaaggtcagagactccagaaaggttataaattcatatccatacgttttgaggaggaggaggagcaggagtagtgactgatggcgatggttttgggggagcttctttgcgaggaattgcttttggttttcgttctgcttcaatattgttgcgctgtgatgacccagaactcccatctgtgtgagcagcaaacatgctattacatcaacaaaatacaaacgaaaagaagaagcttggaaagagatactatactcactgtgtggatttggcgagtatgaaaaatcaggaatctgcaaaaggaatagaatgttataaagccaaattgccaagaaaaacctctttggtcaataagattttgttaacctgacggtgcccattttgtaggattctctgctgaggcgagtcctcatcagctgccatgccaaaaccataaatgcatcatcaacattttcagttttgtaaaatccaaaatccttcattcacatattccatttaaaacctaacaaattttctcaaacgaagattaagattacccatgacagcagtgcccgggtctcccggggccttcaacttcacccattcatctacaatttccttccacttcctgcacacaaacaaaatgaacgtaaaagtcaacgaaaaaaacaagatctccagcaaaattcatccactgaactgttgcaatgcacacaagtatgaaatatcaatcaacattcattcttcatatttaaaaaatagtaataataaaattcatagctagttccaaaacctgacgagtaacttgaccaatctcttgacatcattagacgaatgcttccgcaaccgattcacatacctcccaatgtcagactcctacggaattaaattaaacccgaaattaaaaacagtaaaccgaaaacaaaaacaataaaccaaatgaatgaaataaaagaagttatacttgtaacgcttggaatgtgatatccatgtctgctagattctgcaacaacttcaccaacgaatcttcggactgataaatgagaaggaaaaacaaaatcagaaacacagtcaacctaaaaaagagagtcgtaaattgtgaaattaaaaaggaaaaaaaaaaaaaaaaagacctggtgagggtcttcgagttgctctttaatgtctagaatcttcttctgctcgtcgtcgagcaagcctccgtaaggatccttttcctcctccgcggagggactgctctgcgtcctgatttctccggcgtcggcgtcggcgccacagttccgacactgcggcggcgccgaactcgctgcgtaaaggcgctccacgattctgtctctccggcgcttcaactcgtcggcgtggtcgacggaggccaccgcgatggcggcgtccatgaaggcccaaacgtcgacgccggcgctctccagaatggatcgaaaatcctccgaatccatctccgaaccggaaaaacgaaatcaacctaaccaatgccgagctggtgtgagaacgcggatccaccacagaaacaaacaaaaccaaatatctattctcttttttcggttttttttttttgggggaaaaactttagaatgagggaaactcaccagaatagaaggaaaggaaaatatattccgcgaaacttttttttttttttttatgttgaggaaattaagtagtagtattaattattattttcatgcgcgtgtagtttgttttgtttgccgtaggagaaaaggaaggagatgaagggacaaaaggtgaagagaatttgagaaatgagatgagaatgaaatcgcctcaaaatcataataagtatttcgttttacgtttaattattccgtcgactgattatttactaaattttaaatttatatttattttttaattagatctctaagttaaggattaattaaaaatacagatttaaagatctaataataaattagagatctaattaaaatttaaaataattagacatgcaatcatattaattaaactttttttcttatatttgatttaaaagtatatgagaagggatttatataataaaaaaaaggaaaatatcaaaataatgacagtctgtactgcagcttgggagagctaaaaacacaaatacacaatgcctccccgagtctttcttttggtcaatgcaacactcaacttgggccactacttttgccgctcccgccttcctttgcgacatttcttcaaaaggcccaaatttgaactgataacaagctcctttcctaagataacagtttaaattagggtgtgattaaaaaacaattgcgttcaatgtaacctacattagatgtattattagttttaaatttaatggcttaggtcttttttccttttctgtttttctcttttttccccaactccactccaactatgctttgaaatattgcattcacctctgacctagccaataacgtcagttgtaaggtctctaatgtttgtgtcaccacctcacatcgaaaccattgtcgattgtaccaacctatggacatttctcatatccccccaacacctccaactccctcctcaatcatattcgttaattgttgtctataacgacctaaagcttggaaaagaagacaaatgtgtaagtggaaacaaaataggagccacgctactataatataaaaacgtcattatttgagcatcataattagggtttttcgatttgaactcctcaatcgtggggtttaagctttccactaatcactgtgtcaccaagtgaaattagtaaaacaaacatttctatgattttctctagtcgtataaatagtaattataatgcatgtgattgtgtatgtagatctagtttgccaaatgcgaaagtgtatgtctataggttggggttgtcaaggataaaaagaggggtacacgcctctagaaaattggatggagagaagaaacgggggtaggacagattaaaaataaggagaaattaaaataaataaataaataaatctcaaccgctgaaagaaatactcacacttaatgttccaacatgcttcaaacaataattgttaatgagatatttttttgtagtgatcaaattgatcacagtcgattgaaataatttagagtcagtcaaaatattttgttataatgatcaaatttaaagtttggatttttcttgttgaaaaaaaatatgaaattaatattttggaatttttactttattaattaattatgttcctttcacccataaaaaagtttttcaaagtattttttatgtttataaatttagtatttagtactttttatgataaaagtgagaagaatgaaagaatatttaaacagaaaatttatgtaaagatattttttcaaataaaattacaatttattatatttttatataaaattaactttttgtattatttcaacacacggattattcacaagctttaggctataaaacttattcttgtcttgttcaaataattttatctaaaggtaaaattaagcttgattgtttattaaaagaaataatattaatagaataattaacccataagttgaaataattcataaattgcttagcttattatcatgtttaattgatctaacattctctaagcctattttttcttctgtttattgttaattacaaagatataagtctattaaagaaattcctcaaataaggtatatataagaaaatgataattaataatgtcttaaacttttaaataacaaataaataagaatagaaaaattgttctaaaaggataaatattaaagcacggaaggagtattgtaaaaggtttgggttgtaggatcttattaatttaagatattgattaaaaagtattaaatatactataaaagtatttttagttatcgaaaagataagtatcaaataagttgatactctcaatacaatacatatattttaaataaatattacaatttaatttattagttaatgcctttgaaataccagtttatattatatattcctcaaactttacaattttatcaacacccctccttataattgatgtcaaggtaaaaaaatgctaccttcattcttaaatatatatttttaaaatattcttaattactcccatatcaagataattttatttttaaagatatttttattgatgaccaacacacattaattataattaggtgaaaaataattgttaaaaaaagtgataggatgaatttcaacaaatttaatgttattaatagtattaataaatttttaaaatgtaaattagttaaaaattacttatactttaactttgttcccataaaagcattatatttttataaaacattatatttttatgacagaactatttttgtattgttaataatatgtttgatctctggtagaattaattattgattaaattttatttatttattatcaatttttaaattaattaaaattatttttatttgatgaatcagaaataaaaaatattattaacaacagttttaaaaaaacagttaaatcattaaagataaaataatcatttgaatttaatgactcacctgactttgcaagccaaacactcaagcagtaatgaagagatgggattcgccattctgtagtcggttgcgccctaattaactggcacgatattcaaaacaacatttataatctcaaccactaccattccaccggtttctatttttcaaaatttgtcggatatttcaatgcattcatgagtatatttaaaaaaaaaatagttaaattcatctttaaggttctgtttggtcggagagaaaataaaaaaaaaaaaaatcggaaaaaaagaaaacattttcttctgtttgtttagagaaaaaatgaaaaaaaaagttattttttagttacaaaaatttaaatttttcctttctttcattttaattccaattcaaattttaaaatttttcttccattttctttctttcctaaccaaacatagggtaaagtatgaaatgctaataaattatttgatgaaaaataaaaaaaaattaatttaatttttaaatatgtaataaattaaccatacaaataatttaataataaatttattccttaaaatataatttattattaaattaattcttaaaaattataatctaataacaatatggtttcataaatttaatatcaagattaatttattatattttatatattcataaattaaatttgtaatttttattttttaagatcaacttatcatcatccacactttcaaatttgactatttattattttataagaaaataagtgtatatttcgatacttaaatatgatatggctttctattatataataattatttaaaaaattattttaaagtgagctttacttgtttgaagcataatactgtataaaaaactgacaaataatatttaaaataattattacaaatatcaataatcaataataataatcgtaaaaccattaaattcttttatacttttagacttctaattaaattattccataaataaaactaactttacccgcatttatttttacaaaaaatatttaaacggaagaagtaatataatatatttaataattttaaatataattataatattaaatttaatatgacgtatttaataatcttagcatctaaaaatgatagaaaactcatttgaaactctccacttttacaatatttaaatttacagttttattgtactcgttgtttaaatcattatatgaaaaggttttatgttcattattgtgttgtacagtgaatattcatcattacattttatcaattcataatatatatatatagttaatttaaataatttttttatattttaaagctattttgaccattgaatatgatatatacatgttattattgtatataatgtaatattcaaatggtaaactcatttaaatttttaataatttttatattatacataattaatataaatctaagatgtataataattctcactatattatacaaaatatgtaatagttttacagttgagagaattggaaaaaaaatattttatattatttttaaaagctataatctgtataattaaataatgtaccactacaattacacatattatattttattattccttttaaaatatgtaattttattattaattaaacaatttacttttacatttattcattttatattaagttaattttaataaatgtacgacgtataatatcaaataatatttttaatttttaatggaaaattgattgaaatatctaacaaaaatatcactcttttaagttttgattacaattaatatattttgttataattaactaacattgtacaaatttgttaagggaaaaaatatctacatcttacaacttaatagctaatttagtaataaaaaaaacttaatagctaataatacattttcttctcccaggtagtattaaacagcaatataactcatatttttttacagaatcttgtttttttttttttttgttgatacaacacttatcaattatcttgtagttatagacaactcactttatatacgtattaatgtaataaatgatatactagatattaaaacaataatttatgttatgtatcatttgattctaatagtttggatctagtttatttaatttattattttaaatttttcaaatattgtttagaaaactctaaatattataaaattgaaaaatctaattttatttataatataattataaaacaattgaattattttatcattttatattttaaaatattattgtttttattcatttcattaatatttattttatgtatataataaataaggaaaattctttgacgatattttaaattttttattaaattgcaattgatatttgtttgtggggtttgtggaaaaggaaaattctttgacgatatataccgactgtgccattgcatttcactagcaaagggaaaatcaaatagagtgtctactagaagaaagaagaataagagatggcaaaatttcaagaaccggaacttcccgtcaaagcttttggttgggctgcttcagacacttccggcacgcttgctccttttcatttctccagaaggttttattttttatttttttattcatcactttgatctcattgtttgttggttcattttattgatctcactcactcacttcacgtgcagagaaaatggcgttgatgacgttactctcaacattctcttctgcggggtttgccactctgatctccacactctcaaaaacgactggggttacaccacttaccctgtcgttcctgggtatccttctctctcttctttatcattcttttttttttattattattattattataaaaaaatcattttaaaggttacgatatttttttcattgttgactttttcttcttcttcttcttctctcaatcattttatttagcccccaaacatagatttggggtagtaatataaattatttttaccaatgtgctatctgacatccttaagtttatccaacaaaacaaagaccacgctcttcttgatccttgaaccgacaacagttgtggcttggaatttcgatcttagttgttaattgacatcatttttctttggatttgggtgttttaacagcaatgggggaaacattataggtagagggaccgaacccttcataaaataaacacctaattctaaccgcacgttgtgttttagacatcacctcacatggactctgtgtgtattttatttatatttactttatcatttcacatcatattagataggagacgtaaggttgaatagatgggtaagataaaaagggaaggaggaaaatgttaaagatattttcttcttattaataaaaaaacaattgagggtgagtgtggcacggtgctacagttgggtcttggttacagttggttcttggttatgagtttgaatccaaaaatagtttattttttagttaatttgttttaataaaaactaataattaatatttgttgataaataaaaaaaacattatattaggaaaacattatatttgagtttaccttgcatttacttttgtttttgtgtttttcaggcatgaaattgttggtgttgtgacaaaagtcggcaacaatgtgaaaaacttcaaagtgggtgataaagttggagttggtgtgatagtggagtcttgcaaggaatgtgaaagttgccaacaggatttggaaagttactgtccccgccctgtgtttacctataactctccttattatgatgggacacgaaccaaaggtggttattctaacatcatggttgtgcaccagcgttatgtgctacgatttcctgagaacttgcctcttgatgctggtgctcctctgctgtgtgctgggatatctgtgtatagcccaatgaaatattatgggatgacagagccaggcaaacatttgggagtggcagggcttggtgggttaggtcatgttgcaatcaaacttgctaaggcgtttgggctgaaagttactgtcatcagtagctctccaaacaagcaagctgaggccatggaccgactcggggctgattctttccttgtttcatcagaccctgcaaaaatgaaggtaagtgagatacaaatacaagatataaagagtttgaaagaactcgtttcatttgggttctggtttttgacaaatttactggtgcttcataatgcagttctgtaggaattttgtaaggataatggtattcttatgttgctgttgggtgtctctggtagctagtaatttgtgatttgtttcttactaaaatttactattttgcaatgggagtcttttattttacttattgccatatttcaatagctatcatcaaatagtagagttactagcaagagctaaagctaactaccgtagataagtgacaaaggtagtggaatagagagttatttgagactacctaccattaccctgttgaatagaaaaaatcaacattaacaacctttaacccaaattaatcgggatcaatggtagatacgaggagtttgaaaaaaaacggtaaaagcaaagaaagggggaagaaggaagggggagataagtggaaaatgactaaaaagggaccatctggaacataaaaataacaatgagtctaatcttccaccaagtttatagtttttctccattctgtcctaagacacatcgtccgtcaatctatatcttactccattaaatcttgtttaactaactttcccatataagtttcggtctacttctacttttctttgtgtcgagctcttggtgttgaatagaaaatatagtatacaaaatgttccaagtgactttttgcagttgtagttaatgttagccgtgaagtgtgtctcaatcgacatgagaaaatctcacccaagatgatcaatgggatgggatatacactattggagcactttattagaatataaaaacgaaccttggtttgcttctccatgataatcaatagtaaaataatggattattttactattgattgcaattgctgatgatgatgtcattgtaaatttgctcgtattctatgcaggcggctttgggaaccatggactatatcatagacacaatttctgctgttcattccctgattccactgcttggtctgctgaagctgaatgggaagctagttactgtagggttgcctaacaagccccttgagcttcctatctttccattagttgcaggtaagcagccatcaattatctccaacatggtataatgtagttttatatgttattagaagtactaacagaaggtgaacagaacctgattttaccacaagttgttcctcataatagcccaatgttaaagtctggttttgggtagatggcatgtattcaaatttaattaatagttgcttgtgtcttttctcattttagtattgaatgtcatacagtttaattcaaaccaagaatgagtctccaacccgcacatctggaatgaaacatttcttgttgtagcttatgttctatacttaaaacttggagcaggactccctagtttcatagtaaataataatagtgcatggatttggcaaatgaaatgttttgttatgtcacatacgcaggacggaaacttataggggggagcaactttggagggatcaaagaaactcaggaaatgcttgatttctgcgcaaagcacaacataactgcagatattgagctgattaagatggatcagatcaacacagccatggaaaggcttagcaaagcagatgtgaaatatcgctttgtgattgatgtggcgaactctttcgcaagtttgtagaagccaccatggttctcgaactctttgcatgtgtggcctttagatgtctcagtattttggaagtgggttggtggtataagtagtctattataagatgttgaacttaaaagacgagaacatctgctaattaataatactttgggttttgaatttatattatgttttatgttgatgaagtcgttgaccaagcgtttcaatttttgggactaaaaaatctaaattggtcgttcgaattttacaattttttgcgaccaaattatttttttaagatatttaaaatgccattctatttggtcttcaagaggattatgatagtaatataaaagaatatactattaagttattactttgtatttataagactaatttggtgatgttatttttttaaaattttttattccggcaatatcttaaattcttaatcattagaagattatataagaattaatgttttgtccgatattgctattattctttctttttgtttcatgctacgcggaatagtagcatacgtctaaatccaaccggcggctatcgtcggattttctccggatttagtgtttctgaatgtaatggactatagagcatctcagaccagtaaatctttttacaattacattttgttattttataaaaattatcacattataaataactatattgaatgttttaaaaatattaaaaaatatacaaaattattctatgaaatgtgtgaagtttttctttctttttgactgagaaatgtgtgtaaggttgaaatatatttctgacatgaaattttataaagaactttggtttgtacattcttaggcaaataaaaatcagtgaaaatgatgttttgtttaaagaaacaatttaacatcatatcggcttttttgcgaacaatggttagggtggtatcaaagagtgaagactattctaaatccaaataaagctattaattattacaaaattcaatgatagaattataaatcacttattaaccaattgccatgattagaagatggatggattaagagatgacacaaaaaaacagatgggttaagagatttgactctgtttgcaggcaagaacttaaccaaacatgatagtggataattcgaaaactgatggattaaaagaactaagcctgtttttttcatgcaagaacttaactagacgatgaaacagtggatgttcaattgtcaaaagttaatcgaaattataattgaaatatgccactaaagttagaacgataccactagccgggcacgcatatcgctcgggactgtccaaatcattgcccttacggattatttgaatttgatttattaattatttgtttaaatttatttatttaaatttatttaaataaataaataaatttaagtttgaaattagatttaattcattaaatgaatgcagtttaaacttttgacattaaaaatttgtgaataacttttatatatatatatatatattacaatttttttttataaaaacagttttgtctcttaaaaaaagttaaactaattattttttattttttaatttcacttataatatgttaaactgattttgctgtccgtaaataattatctagtattaaaataatttgtcatgaagaagaagatagattaagagagttgaatattcgcatgtaagataatagtatcatgacccattcttaaattatgatcaacgtacaagctataatttccttaacctgatggcctgctgagagtaatatactaattaatacaagctataatttccttaaatcaagcatttttcctcaacgtacaagctatatgtttgcattgccatttaaattacatcaacatgaagtctgatgaaccttcatcgtagaagtaacaaaagacttacttttgcaaacggaaattggagttagtaaaactataatctaaacatatgctaagacacaaatagaaaacaagtaaagggtgctcccaacaaatccaacaaagtccctcccaaaacaagccaatccatttattgattcacctttgtttgatatgtataatttacacctaataattataaagtataaaatttattattttaaatacccattcaaatttataagcatgttggcctatatgtgggtcttatataaaaggaaaaagatttttgcaaacggagatttttgctaacagactaaaaaaaatttacttatgcctacggagatttttgcctacagacataaattattgtaggtaaaagtcgaaaaatacttatacctactattgtttgacgtaggtaaaatttagtaatttgtacttaccattatttagtgtaggtaaattcattaaaactaaaaatgacttctacctacaactactttaagtaggtacactccaaaaaacttttacctacaaaaatctagtatagaaaaaattctaaaaaacatatacctatgaccactacaaaaaaaattatccatgtctatggaggtttctgcttacatacataaattattgtaggtaaaagtcaaaaaatacttatctctacaattgtttgatgtaggtaaaattcaaagttttgtatctacttttatttagtgtaggtaaaactcaaaataacttaacttacaaaaaaaatgcctattcttatgaaggtttatgcacataaattattgtagataaaagtcaaaaaatatttatatttatcattatttgatataagtaaaaagctcacaactgctgtccattacacgtgttagtgataattttaccactcacgaatttcaagtataatattttaattgcaactcaatatattatttaaaaaaaatttgctaacagactttacaatatattgttttttttttaaattgaaacttaatagcgtagtgtagacccactccagaacccaaactctagaatcgtagaaagctctcatctaaggttcattcatagtgccgaaatttagggttcttcgtaacaactctggaatcgttaacgcaactcgcgaatctagaagcattctttttcttcttcttcttcttacaccgcgttctctctccgacgatctcagattcaattttccgttctcaggtccctcctcttgcgagaatgcgttcaggagcaggtcgtagaggaaggtcgagaggagtgtgtaagaacagagcttgttttcgaggtgacagagagcgcacgagcgactagtgcgagaggatcgtcgagtagaggtagctcgctagcgccggctccgactcagcgtcgcggcgcgcctccgccttgatatgttcccgttaacttatcaggtgagtcactgtgattgtgattgtgactttgaatttcatgtattcgttagtatgaatttatgcatggcttgctttcagttgatgatgaaatccattctaatgtcgatccttaaattttccctctttattccttaaatttctgtttggctttgttgttgtggtggcttcttagtttcatttgtgaaaacatgaatctctctgcaggtttccatatttcttgccatgcttattagtatcagcttttgcatttgcatcagcaattgcttgcatttggcttccagtaaatatatgggttcatcattcacatatctctaccctctttaatttttatcacttttattcaaaacatttttttttctaaacactttattctaaacattagtatgattacatatctgaatctacattcttttatgcaattgcacataatttttttatgcattgacaagaggccataaggtaccttcctccatggcttttcctataaacttaaactggtcgtattgagtgtacttcacttatttgaatttccaaatttgtaatcttcagacaaatttagataaaaatcataatttagtgttgctctagttcgtatagcaagggttagcttccacctcatgtggcaactactttgatttagcattttatttttgtttgttttaaatatatcttgttatttggcatgatatatatgcaggtgttatccatacctctcttgcaatgttatcccctcatgacaatgttatcaggcttcacactggacatagtgatcaatattgcctccattctgaagcatgtcttggttgtaagtgaagctctttccctgtatagccaatcatcagtgatattgaggatggaagtgaattgaattaattggcttcacaaaaccttaagaatcattttaattgaccgaaaaatgttatttttgttttgaacttgcctaattgtattattgttgctggatttaggaggcaattgctaccagtttattcgttctgcaaaataaagttgtggtaaatctttggttcctttcatcagctttcatttatttccaaaagttaagattgttttttagagaattgtggcacatatggtatgttgatttggaaaacaggaaccacaccaaagggggacagctaatagtattgctaaccctggtatgtcagcattcaaaacggttggtcctgctagtgccggtgcattgtaagtgtccattttatttctttagcatttgaaatttatccactgtatacgattaattatatagataaatcttaatgaacttgcatctgaaaatccatgctatatatgttcatatatgacatcatgacatggtcctatcatccatgtattctagatttccaaaattcagaatttcagacttattggtgattcaataataggcatattttaggcacattattgaaaaatttaatggattaacaagaggcaatggtggataacatttcgaaaatttaggcatacaagtagattgtgccttcagcatcaaggataaacctatgaacacaattaagggatttaatcaaagctatacaaataattatgtacagtatagatgctacataagatggcactgtcgtgttcttgaaacattttatttcattaatcatgaagggattttcatatgaaaatattattatttagattttagaatggtttttcaggacaaggacatactataaaaacctgaagtgtactgagatcaatattgcttactggtcaatgtagattatcttggtcgcaaaagcatataaatgattctttcctgccaggtatgttgattaaataatttgcttgaattggtttctatttcatatacagaatatgggaatccttaatcttagtattatttctagttcacttattgttccttaatagaaaagaacataataggccatttctattacaacatagagtttggcctagaaccaaaccaaagaaagaaaatgcaactttcgaatgaagagtttgaactttaatttaacctcttatatatgcttaagttcaatgttttcttttgctagttatattgctggaagctcactcttttacatttaactgcaggcacccatattgtcttccttgccctgaatattgttgaaggacttggggtactgttaatgttcaaaccattcttgagtgtaataccattcttaaaaaaaattattttaattaagttgttttaagaattctatttcttaaatattattcttaaaaaaataatttaattagatataaaatatttttatgccaaatgtcatctaaaattaattattttcacgtattcataagttaaaaatctcaaaaggagcattcttttttcttccatcaaacataatgtttgtgttcaaaccattcttgagtgtaaagaattaaatatcattcttaaaaaaaattattttaattaagttgttttaagaattctatttcttaaatattattcttaaaaaaataatttaattagatataactacttttctcttctcatttatgaaagggatgagggcgagcatgatcatcggcgaagagagcggaacagaggttgttaaatatttatggatttaactacttttctcttctcattttttgatgttcttaaatattggataacaggcaatgcaagttcatcccgagttcatcccgataaaaacccaaacgatcctcacgctaccgaaaagcttcaggtagcttgaatccacaacaatctctcaagtttactagtagaatttttattattattactataatttagttagaatgcactcatctgattgttgattgcctaatatagtaataactactttaaacaatcttcaagaaacacggcagctagtaacgtatataaaccatcttcaagaaacaaaatatcaagaaacaaatataaagttgcttaaaaatcagtcttagattatttagttttattttaaagttgattgaacaaaatattaagttagtctccaattctctgttttcttttataaactgattccaattgaaggtgtgatactgtatttgattattttaatccatatatgccttgtagaatatttgtgttattgcccttcatatagttttattccaattgaatactaaaaattccataatgtgactgttggtctttatctaatttctttgagattgacccctataccttgtgcatatataaacaccaacacttccagaggcacatttggaaaactagagttgtgtggtcactatctttgttcttgaaatcatgttcttaaaatttaaatttttgtgagactcacttctgatttaacaagctccacttataatttttattatttaaagttgtaattttaactatttttttatattccagaataacctaacaaattttttagatacaaatttattttggatacaaattttttaggtgtatcaacaattagttgaaaagacaaaatcaactcctggagctctggttgagaacaacaagttttgtctttctgttcattttcgttgtgttgatgaaaaggtacaaactaaaagctatgaattttgggtaatcgagtgtgtatatatattgttaaggtaaacaaacatgattcattataatttaggtgtgggtagtataaggaggtttctttttaagtgaagccatgaaattcatgccagggaaacaaaactatttatgttctttgttgtatattatgtagcagataacacatgtacttctccaaacacaagatgttggagttcaaatggtatggtatttagttatccttttcttttcatgagcattatgaggcctaacagcgagccactataatctttgcttggttcattttgtctttttgatcagtaagtccacaactagctcttgcaactttagcataccttggtaatgacagcggctataggcttggcttgaacatgaagaaatcagcagtggcacgcagtggttgaatttgaattctaaaccttttagtggtatataaactatgtttataatcacataaaattatgtttttttatataaaaaaatacataaaaccatgtatgttacttttggttttgtttatgtaatttatctttcattataataagataatttgtatagaaaagaatatgaatggatagcaatagaaagcatagctagaattttatttacttgtgtttttctttatgaaatttatctttcaccataataattaatttatgtcctctgtacaagataatttgtgaagaaacaaatatgaatggatagcaatagagagcatttctagagttttatttatttattaatatataacttttacctacaactgaaaattataggtataagttctcggcttctacctacagttgaaggctgtaggaataagttcatagcttttacctacagttgaaaggtgtaggaataagttcataacttctacctacacacattgtaaattgtagataaaacctatagtgacggacaattatccgtcattgtacgccccctcaaagttgacgggcaaaatgtccgtaggacaaagtctatagtacatttatctaagcatttttaatttttagtgacagtttttgtctgtaggcataggtcattttccttgtagtgacacctaataattataaagcataaaatttattattttaaatacccattcaaatttataagcatgttggcctatctgtgggtcttatataaaaggaaaaagatttttttacatccaaaatatacatgacacctaaaaacagaatgaaaaaaagagaaaaatataaatataataggtaatatgatgtgataataaaagagataaagatagttgatgaaatgtataaaataagtgagtgttaaaatatcaccactttctataaaataagtcacttaagtaagttttcagttagatgaggtgctgatataggttaaagtaaactctaaaatttgcttgatcataaataaatatattaaactcaaattttgtaattatgaatctgaccaagcttaagactatcaaaataatttaagaaaaaatcataaaagaataatatataactaagcatagattatttagataagttaagttcaagccttttttttaacaagaaaagctcaaattttttttttaacaaattaaactcaaagttttgattagctagactagtttaaataaataaatcaaatatatatatatatatatatatatatatatatatatttactagttaaacttaaatctagtattaaactatacttcaaacatactacctcatttgatacaaactctcaggaagtcaaagtcggtatgcagatacaaatgtgtgacgacaatggaatatggtttggaacaagttaacttcgttagatgtgcttagcatattcttccacttataattattctgcaggctatacctagtactatatatattccacgtactctctgcatcactgaatcagcaaccactaaaatcaccaaattccaagcttttccactttagaaaaagacatgggtgctttgtatcagatagttcttctgaacattgctatttattttgcatcagtcatgcataccacatctaggagcatccaactgatgcctgtggacttaacactcggtttcactgaactcccactcaacatttccaattttaaaaatcaaaagccttataatttacccgtaagagaacgctataggtttaaaaacggagtacacaagctgtgggtgtacgccacagacaaacctctatcctcacatagcaagaccaaccctcgttcagaaatccgcatagaggtaaattaaacttaagaaaaatactaactagtattcttagatcattagttaataaactaaaaagagaaaaaaaaaattaaaatacataaaattacattatttgtgacttttttttatgttatcacatgatctttataataaatatatatatatttttaagttctttaaacaatgttctaaaagtagtcctaatgatctctttgatttgcttaaattaaatgtacacactatgtggcttctaatatattcattatttatataccttgcagggctacgattattcatgtggggtatggcaatttgaagggcaaggttttgtgcctaaggatacttctggggtgtgcattatgcaagtgttcggggcacaccctaaacgtgccaccacttttatgcttgatgtttataacaattcgctcgtgtattataataattctgtcctggttccaaacatatgggacaggtggttccagttaaatgtgatccatgacgtggaggcctccaatgtgaagatttatgttgatggggttcaggtttttgaagccccgggccagggaggaagttcccattatttcaaatttggtgtctacgcgcaacgtgatccttcttgctatatggagtcaaggtggaaaaatattagagttctaacaaagtcttcatgattgtacgctttggatttatattaatttccttgtatatccacgagtttgtatctctggttttcattattcggttattgaaataaagtttttacctctagcttcacatatgtctgattttagttatgcttgcttggcaaatatatgtagttatattaatttcacacacccaactttgagaaaaaaacgattctaattctaagttagatcaattcatagattaatgaaaaatgggcaatgcacattttcagaatattattagacgaggtcttaaaatactatatacaggaaaatgacataataaatgggttctattctatctttagttacacaaaatgataagaataaaacaacacattcatttcattcccgtatgttggtaggcgtagcgtagcaatctatgattcacataattacaatacaaatttccctgattatcagaagaattttgttataagtaaggatcaaacataactagtgttctaagtgcctatttctaatcaaaatcggaatctgatctggataacatcaatttttttctaagtttagtcattttacttcttcacttgacacattttaattataagttatatcactaaggggcgattcattctttaagagcccttacgatttcttgtgtatttacctaacggagtttggtgagtaaaaaaggtgtaactaagtattaggaaagaaagggaaaaaatattgtctaaacttggcagcaatattgcatgggaaactaacgatcacagaatgtaacctgcatatgtattattgacaaatcatcatacttattctcccgtcaaatttaaactaacatacttttaagattcaaattggaagaaactaaatttattctatagatacataagataagaccattcctcttacatgggaaaaccatgattcactcttaagagaaggcaactaattatcaaattgaatatttgtttaataggttgggttggcaggtccatcagcaacaggggccaaagctgggcttgaagcagcagcatcacaatagccacgtatattgagagcttcaaggtgagtgtagcccaaggaagtgaggatttcgggccagcaatcatgggttatgaccgtaatggcacagcaacagttggggccaatatcagcttgaccattgatgaagaaatgcataatctcattcgaacatgattttagcaaaatgaggttgctccagcactccacatggttctgttttgggctcttcattgccaagtcccttgttgctgttccatatgcaacaaagcatgcaagggccaacaagaataatccatgtttgagaaccataaaatgaaattgatgcttttgtggtgacaattccaagatgacaagcataactgttgtttctcaactacttatatactattagtagtgcttcatttctctattactacattattatttatttaatcaaagaaatgggatggttaattaacgtaagtaaggggtatttataaaactgtaactatgggggatatgaaaagagcataattgccttcggccttcattttgcgcaacctttgaatttcacttctaccaaccgttagagaatttaattaatttcagctttctttggaggcttcctctcttcttcttaattttattttcatataattaatacaaataaaattaacatcgatattaatacaacaagaaagaaagctacatttgctttggatggtttggatggttctgagtgaagttattagtagggtgtttcttttggcccttacatgttttgctattggctcctgcctgaaggtgaaaagacacttctgtctctcggttcaaaattcttcatcccgccctcttctttctttcctctacccgcgtcccgggccccactttctctgtgccttctccattccaaatccttccatctcctttcgcttccgttctcccccttcaacacccctttgcgatagtaagttttttttttttttttgcgagtttgtattcaatggaattgtgattatgtcgtagataagtctacaactgaatcctatttttaatgtgtattttttatttacttttgaatatacaatataattacaatttcattgtatatataaacaaagactacaacgaaatcataattttgttgtgtttcatcaaaatgcacaagtagaatcatgatttcattatgatctttgtctaagaacacaatagaatcacaatttctttgtatattttaattttatttatttatttttagactaatgaaaaaatattttcttttcttagttaaatataattattttttaagcaggattattgacttatttttccaaaaaaaataatttagatttgtgatgacttacatgaaaatgatattgtacattgttggatgcaacccccttaaaggcccctcgcttgaagggaaagaaggcatcatagagtgattgcatcagcaccacgtgatgatgcaatgtaaaggcgatgccagcttctattaggatccttggattgccatttggaggacctcagagctattcaagagagtacaagtcatcaacaactcctacaacaagctttgcaagtgttgcatgagggtttagcagttgggtgcaactcgaacacacggagacctaaaaagaagttgacaagggtggcaaaggaagttgatcatcgtattggacatattctattgttgttgttgttgttgttttatgttttaatgtagtatgtataaattttttttgtttttatataattttttcgatttatgttgtggttgatttttgtgtatgttcatcaatggtttaaacaacatgcatttagtaatataacaacaacggtctcttcatttaattcataaaataaatatcaaaaactaaagaaacattgatacaaaattttcttttaaaaaaataacgtacaatttttataaattaaaaaatgacaacacatatttatcgtgcattagaacaataatttcatcaacaaatctttgtttcattggtttatgcatcagaacaatgatttcatctggagatcgaccaatgttttttgtaactcaatcgaatgtttgttattaaattccaaaaatatgaaaaatattttttaacatcatcgtcgtatttaagttctatacactcatattcaacataaccattatctacataaacaggttgatcataaaaaaaggccaagtaaaactatgctaattccaatggtgtccataattgttttccttaaagcatcaaacaacatgtcttcacttattctaacgactttaggaccactaggacaattaaacaatacttcttcaaatgatgaaataatgtcaccatcgtaatgcacaacactctccgtgttttcagcaataaagtgaatatcaaccaaagatgttgagttgcatcacacccctattgctatttatattagattatgtactgtttcgtgagtcataccaacaattaagactgcactgataaaataaacgatttagattgtatccatatttaatatagttagtatgtgtatcggaaaaaaatagtgctcaatcattacgtacagaaaaaaaaaaagggttaagtcaattcaattattgtagagttcaatcaataaaataaaaagcattaatttttcttttcaatttttaaaaaagacaaacattataacaaaatcacaattttattgtgtcaattggggtatgaatatacaatggaataatggtttctctgtgcacgacctacaattgattcatgattccgtgggaaagatattttgagaataaaaaaagggtcaatcacttggtggggcctaatagtaataggagtgagaccaatagcaactccgttcgtatctcttgtttctggactctgggtccttaagtagtgacttggacattcggcccgatccatttaaaaactggcccattccgagaaacaggacacaaccctaccacatgatatttagacatccattttaaaattgacacgtcattaaaagtaaaatatatttttttctctctctgcattcattccttctatcggctccctcacttaccccaactctgtttgttcctccctccccgccgtacaatcccaccctcgccgccgcagaatagctcagtgaatccgaagctgtgtgaatcgcgtcgtactttggagttccttgacgggttggattggagatttgggaagtaggtacagaacgagaatgtgggtctgcaagtgcagttgttggagatctattggttgcatctaacaactcatatttaatttaggggtgtgtttgtcttttctcctagagcgtagtgaagaagaagagatgagcgtggaaaatgatgttcctgggaaagaggtaaacgtgctgaagggtcacgagggtggcgtgttagccgcgaggttcaacaccgacggcaattatgttctaagttgcggcaaagaccgtaccatacgcctctggaatcctcaccgtggcatccatataaagacctataaatcccacgctcgcgaagtccgcgatgtccatgtcacacagtactctctctctctctctctctctctcagaatcatgcatattcggaatgcttcaatttgtagggttttgtactttgaacagtcatggaatcatgtaactgcattggtttatttagggtcaacactcactagttgagttcatgataattcattgattatttgcatgctattattatcagggacaactccaagttatgttcctgtggtggtgatcgacaaatattttattgggacgttgcaactggacgtgtaattaggaaatttcgtggccatgatggtgaggtgagctatccttcttctatttttcactttttccatttctccattctttattaacttcactcacctatttgcttcaatgccattttggccttttataagtgtttgtgcagaagggtatatattactatagtttctgattgataatttcttcttctgcaggtaaatggtgtcaaattcaatgagtattcatctgttgtagtctctgccggctatgatcaatcattgcgtgcttgggactgcagatcccacagcacagaaccaattcaggtggatttcatcaaaatcattctcttgcgtatttttttcctctaacagttatctattacatgcaacagtactctatttgtttctaccttttgtcttttattaatcaagtgatgcaattgacatgcagattattgacacatttgcggatagtgtgatgtctgtttgtttaacaaaaactgaaattattggaggaagtgttgatggaactgttcgaacatttgacattcgtattggcaggtttcttgcaaacataacttcgagaccatcattttgtaattcatgtttaaaacagtctatcaagtaacgcagtacagtgctgttggacacttttgttgtggccataaaatttgtttgcactgtgaagtttttactgacgttctattttctattcaccagagaaatatccgataatttagggcaacctgtcaactgtgtatcaatgtcaaatgatggtaactgcattctagccggttgcttagactctacattgcgtcttttggacaggtatgtttattgtatttttggaaaaattattatgggtctttatccctctgcaagtttcatagttctttcttgtgacaggtccacaggtgaactgttacaagaatataaagggcacacgaataaggttagtctgcagatgcctaaaactgattttagcacttcctattttttaatgttctgcatatagcattgtttaaagatacaggaccaggtgcaagctcccaaagaatttgggatacaagtggagattcactgacatttatatatctgcatttatggactagtatttattggttcctgcaattgttcattcttaaaagcattttcttgtgtgatttaacttttaagtaactttacatgttacaaactttttaattatccatttttattttttttgaatatttgaccatttctatccctcagtcttacaaattggattgctgccttaccaatacggatgctcatgtaactggtggctctgaggatggcttcatttatttttgggatcttgtagatgcatctgttgtttcaagattcagggctcacacctcagtggtaatttcttttcactagttaattctttctggaagaaagttgtgcaagggtgatactaaaaggacattatagaccttttcttcattaataatttgtcttgaatcatgaatatggctgcttcaaattttcaattcctccttaagcctcaacaaaggaaaactggtgccttgatacccttttacaaaaattgctgtttaataattatgaattttcatttaaaccatatatgatttatcacacttgttcattatgatttaattgatttctcacaatttattgtgcattgtgtcgaaagccccgcacgaaaattgttatcacaaacacttgatagttgaaataatatggtaactttcttcctaaacgaagattctctctcaacttcccgagcagttattcgatggtactttggtcggttgctgattatgtttataggaactttgttatttctttaacatatgttccttatgctatattttattattgtcagtttaaagtccgatgataatgtcatcattaccttaccctatggggtgagatgctttattttgttccaaaaaagcctgcatgttgcagctgggactgatgacattttgtgttttataatatgattgtcgttttacctgtagagatgaataggtttcttttatttaacagccttttgaaggatgtgagaatgatataatgcatatggattttctgtcaggtaacaagtgttagttatcatccaaaggaaaactgcatggtaacttcttctgtggatggcaccattagagtatggaagacataagaacaaaatgtaaacactaagcttatatggtgtgtgtccacgcagcccatagcaataacaattaggatagtgattattacatgttcaattgcatatggagtccacagacacgatgttacttcaaagttatatatatatatatatatatatatatatatacacacacacacacatatccttcggcagattttgacctataatatgtgcttttggtgtggaagatggtaaacgcaaggtgagtttgttggttgcagcatctctcttatatacggtcaaatcgcacacagtttttgactttttgtctccgaaagggatagggtattgtattattcacttgtgtccatgaaaggaaaatgttttgtatactatccgttatggagtttttatcttggtttttactggtatagttggaaaactagtgcctgcgatgctcttatgtagctacatatctatgctgtgattcattcaatctttggctagtgtttttccattgatctaacccagctcaaactttttcgaatttgtgggcaccatcgtttgggaaaaaaagaccacccttttgttcaaattattgattgacgtagacgttttggactgcttatttcattaatccttggtttaattaattttttacggttaattgatatttttcattttagttaattataaaggttttattagtttatttttaatgctcagtttttatttgttaaatgtaaaatcggtgtgaacgattaataacagacgattgaattaagacatgttgaacctagttgtcttttccgcttgtcaatttacttcgacaagtctatataggcttttttgttatattaacatttttgacaatataaaacgttacccacattataatcatagtcacaatatatgtgtaaacttctagaaccactttacagtagaccctagctcaaaaattttgatcacttcgtcatgttaataatttatgtataaatcacccgacacgtcggcgatgagccaccacgtgtgatttgtgtttctgtttggaagcaaagtaactcaacaactcaatagttgctcttgcatctgcctgaatgtgagccaaatttcatgtagccaaactagttattgttcctgtttttgagtattttatagtctcgctgtcgcactttcttggcaagaaggattctcttgtacatgtgacttgcaattataacaataataattacaatagtggcagttattatcattatcatcgtcatgattgcatcttgtaaataaatatttaccaatttttatgttgaatagaaaagtactatttcagaataaaaatgtcaaacgaacacgatttgaacatctattttgtctaggtaaagttttttctttctcaggaacgtattttaactaaatttggctagttatattctgatgcttgtgagagacaccgtacagctttgatggtgctggtgatagaattatgtaatgcgtatgatttccgtatctcgcgaagatatgtttgatgcttcagtatcaaatgtatgctacatatatttatacgaattaaaatatgaacaaataagtataccctgcattgcgtaagtatttataaataaaatgtaaattgaaaatattttaagaaaatataaataatgaaagacgattgttactgtttattatagatattaattaagaagttaataaaaataaaattgtcattacaatgaataaccaattaaagaaaatattaatttaattcgacactataaaatacgttcgaaatttgttatgtaatgtaaaattacaagtcccttagaaattaattagtaatgacgtatgtgaaatgcagaggcattaggatcttgaattcaatgcatgttatattcctcgtggtcaacacatataaaaatatagtttgatggacatgctataccaatctaggttatgcatattgaatagagtattgatatactctaaaaagtaggtggtctgtccaatttaacatttcaatgaaccatgtagagagaaagacttgtatatggcgttctccaataataattataataataataataataatgaaggccctttacttgttgtggtgtagaacctttgtatttttatttaaagcaactcgaaagaaagaaagaaaaagatatttttattttttaaaataataaaggacagaggggaggagcgagaaggtagcagcaccgacacttttgctaggtagccaacgtccaacaaatgatcgatatatctgaaatgactggtccattatgattatgtagtgtaatgactcaattttaatattattttatttttttcctttgtgaaaaaatgataaagagaatgaaatgaaggaaaccccatttttcagttttgttgtggccgtaactcttaattgagtagtagctagtagtagcagggttgcagttataggaaagaaagcattaaaaccaaagaagaacaaaagagaggttgtaatgaaattgctaggctggagccatttattcaacatgtcaaatatctttgcccgacattgtgtcccaacccaaatttattttctctataaaactcttttagtttttagatttggtgtgtttagggcatctgtggttcacagttcacttcccacccaacacaagcgaacacattgccagctgttacctcttgttcttcatggggcccacactaaattatgatattggaacttgctcggttgtccctggccccacctccctcacatgctttttaacgtggcttcttgttattattcttattacagtacaagaccatggactaacctaattattatatgagttttgtaattagcacaacttgcctttttccatatacacaccttatttttcaggtgatgtcaaatatggaggatggaagattaaaaattgtcctataggaaaaagaaattggttagtcttaacttttttgttttttaacattgaggattgacttattttaatattatccgtgtgttatgccaaatgattaaaagtttgctaaaagtttgattgaagtaaaaaaaaaattatcatcatatgtgatgaagacccacaaatcaaattaaagttcaataactattaaacaatgcttcttcgtcttctttttattaattctttcttttggttgctttgttgaaaacatgaaggccgtactagctttaagattttcttttcttctcttttctttccgtaggaaaatgcccttgtgaccattagcttccgttggagtagagagacccttttgcgttaccataaccattcacgttggacataggcaaacgttaacattagcatttcattaattgaaattttgcatcgacaaacgaataacaaattaattaaggtgggatgaaggtatcaatcgagtcgattttatgaaccaaaatctctgctcttcctggtgccatgccttggtttaaagagttttatattcttaattaactaaaaataatatagatttgacttctaaaataattattatgaaaattaatgattttaattttataacaatttatgattgaaaacattagtgtatttcaattaaatttttgttttaccttatttcttttaaaaaaatacgttatatggagagattttaatcttacaaaatattttagataaagtatatatatatatatagttataatttaaatatgtttatattaatagttagatattgtgtttgcctccattaatataatattttttaacgacccattttcttaccttatttattttccttttctattataaatttcgttgagaattttttactttatttgtgcatattttctgattgtgttatcaagagctagtacttgataagactttttgtatttggttttttatatttttatatttttccttattttttacaattctttattttaatttgatgagtcaggttgtaaatcaactctctgaactatcaattcatgataggttaaactaaattgaatgttttttacatcataaaaaaaataagctgaattgggttaactcattttttaaataatatatgataaacttacacaaatcaacggagttatcttcgaatgtattgtgtatagatgaattgtcaatgttattttaactaaattaatgactttatatttagattataaatatataattatgttaaatacttataataaaaaaaaaactttgatgttataatggtgtcatatatgactcgagtaagaatacctcaagggaaaattaaacgtgtcttataaaaaaattaaaatccacgagggtggctccctagtttttatttccggttgttgtagaataccttgatgaaacttaaaagaacaagtgtttattttagccattcaaacgtgtaagatgtgaagttacattaatcgtttatttatcgaggatgtgagatataataactaatgttacgtgttctcctattttaaggatcaatttagcattattttatagtatatgtttggaagatcatagtagcatttacttcgactttaagtaaagagtgtaatatcaagtatgtagtgtaatgcaaatttatatttcaatttacttaaatttcaaataatattaaaaagaataaaagatttggaaatatataaaaatatatgtaattattttaaataaattatataaataatgctaagacagagtaaattttaaaacaataaaaactgttttgaaagtatgagaaatttatatttgagatgaaaataaaatcttatactataaatttaaatttttttaaaaatgtggaagaatgaagaatcactcccaaattattattttttgtgaaagtgtttattttttaaacgtggaaatgtctctcattgaaccttcttattttttatgccacatgatgacttcattgttacttaatgtttattttttatattttttaaaagtaaaggattaattaattttaaaaagttattttatgttaagatattattctctcaaattttattgtctatataattttttcttttcaaatctctaatatttataccctaaaaaatttcatttaattttttaaaaaagatgccctttcgtccataaatccaaacttcctgtttttctacttatttgttgaaattatatatatatttattgttttaaataactgtttgtatatttaaaagaagttgaatataaaaaatacttttatagaacacttgcttgttttaatataaaaaatatatttcaacggaattaaagctgagattataaaatattttttaaaaaatcaatattaaggggaaaattgtaaataattaataatttactacaaagaaaatagtaaaataagatatataatcacattcaagaacaatgacttactttgataatataaaagttatgagttaaaaatactttaaataacgagctcccttttttcttttttcttttttctttatcatttttagagtatttttttcactcaatatatgaaaaggtaaaacattcatttgttccccaagtatatatatatatatatatatatatatatatatatatatatatatatatatatatattatgttactaacaaaacagttgaagaatttgtggggggtataatgtatcatattaggaataaacctatacattacttgggaatgaatcttaatattcaatcttcaaataatttaataaaaggtttcattaaaaaaagttataggtttaaatttcactgtataataaataaataaataataataaagtcttgtcttattagatgagatcaaatatacaaatcatataatatcatttgtaaaatgacaatgagataagaaatacatatttataacataaatattcgctccatgtctctcgtatttatatatgcagtcgttaattaaatacttataattttttaatattttgtggatatccatagacattttactaaaaaaataaaaactttgactacaattttttttgtcaattttgccaatttcttttaaaaaataatatcaaggtcaattaaaattattcaaatattctacatagtcactctacacaaatatactaatcaagatactttaattctgttcttaaatattttatcttagttcctaaatgtttctacttagttcctgaatgtttcgtattagtttttgttgacgtcgatgcaaaaatatttttttgttactattaatttaaactatgagaccatttcaacgtaagacctatctttaaatttttaagtgagttttatttgtacgtattattactttttttttttcgtttcaatttaaacatctcaaaagaatccaacatctcctacccaacaccaataactctacatccttacttcttagtagcaaaatgaccaaccaattcatatatagatattgattctcatttaggaaccgagtgcttgtttaagagtgttacaatacttctccaacacttacccaccaataagcaccgttttcatgaatgaaatatatctctgttcgacttgtacagttgtacttgatatgaaactttaaatttgattactgctaatacaaacactagacgccacgtagaagatcactaagaaagatactaaataaattacaaacaaaaacataacatttgacaatcacaaccagggttactaacaattactaacaaaataaaaggactacttttcctgatagaatgcattattataataaaaaacactttaaaagacaaaaaaattaaattttaaaaagttgatgaattaaaaattcaaatgatcatacaattctatcttccagaaatcaacttaccaacatctcacacttttaaagatataaatttgatggttactcgaaactaaagatacgtaggttatatgcataattgtgaacttgtgaattgtgatactcactttaaagcgggcacgaccttaggcctttactttacgggattagtaaaaataaaataaaattcacgtattaattaggatttttatttttttggggaaataaacatgaagtgccttaatacggtgcatattctaatgtttttaattaataaaaataaaagtatagatcatactgattcatggcattactacgaaggtaatcatacgcaaatcacgatcacagttgttttaacgtgaggtggactagctttcataaatcgacgaaaacgacaattttatttatttattattctattaaaatatcaccaccgacagcaggcactgcccatgtggcataaaagtcctaacaattattctaataaaaatgccgaaaaagaaaaaaggaaacaaaacaagaagaaatgaagcatcacattatcttattcatttttaggctaactaacaaggcatgttttatactaaattcaatcaatattttactcagttacttttattcatttactttcgaattgattcaattttatttataataatataattaaagacttcaaatacatagtgtctttaacaattatttaaaacatcaatgttccttttaaattttaaaatattaaatgcttctagttttatattatgttttaattttaattgctcaacttacatttctaaaggcacattttataatgataaacggtgtattttggtcagcaagcacagctggaaattacgtataagttcttattgacttgagaaaagttgaaagtgaatgtgaggtacaataatggatgggttggctaacccacgttacaggttaaaacttaaaacaactaataactaaaaggttaagaattaggccagtggacccaaagtcaatcaaatatagatctaaccacccaaacccttcttgcacacacaatataggaaaattataaactctaaatacgaacctattgtttaattaccttgtggaatactcaatttttggttatcagagttttttcatttgttttgtttttattgctttaaataaatttgtaaagtgaagtatcgtagacaaaatgcagagtcggcctagcatttccgtaggcttaaaaaaaagtcaagattaggtttttcataaaacagtttattaaattattataattttatttgacacttatctttcagatccttagaatttttttaaacttgatattcaaaataaatttatactccccacttatttcccacgtgtaatagaatgtcaagaaaaaaaaaaaaacagattaggggaaaccaatccgttattattttaattataatttgggagcatttataatgttaatagagaatatgttagatgtaacttttaaagtaattattataaaaattaagaattatattataaatgttaatttgtaattgtttggtggaataaaaaacatttatactgtgatgtgttatacttaaattctcaaaatattaaataatataaattgtatattttaattaagattaacatgtattgaaaagttaatcaaagaaatcaatagaatatttgttaattaagaaagaaaaagataaaatgaaaaacttttttttaaggaaaaatatttatttcaaaaattgtcaattaactaattaatattttgttattattctgcgaggaaattaaataatgttaataacaaatacattttaaccttatttatttggaaagctaaagtaagtgtttacttattcatgggtcagctttgacaacatgtgaatgaattattttttaataaaaaataaccaattaaatttaaacacatttatatatattttttaaataagttacttaatattgtttcagcttcactattgtaattatcaagaaatctaacacgtctttaatttccgtgaataaaaaaaaacagtttcgtaatttaatatgattaaagtgggcattaatttgattttagttaaatgtgaatgtcaactttaaactgttacattctcaaattagtttgtgttaatcgcacgtaaggctcttttgtttttgggtgtttgtttcaagtggcagtaagtaattaaaaggtaatcatgttcttattgttttaatggtatgttagggtcaataaactattgtcatgctacattttattagtttccggcattttatgatttgatgtaatgtaatacatttgatttattctcagtcaataatttatatttatgtgcatctcatttttttcttctaattataatttcaatacaaaataattttgttaaaaataatgactaatttttattaaagatcacaaatatacataaaatagatatctttctcctaacatagtttatttaacatctaaagcttaactaaatttgaattccataccacttcattaacagattcacagttacttatgtgaattgttggttatgtgtgtgcatcgatctcatgctatcatcacagacatattagtagtaaaagtatgcctgccgatttgataaaataaataagaaatagatgaagcatgatgcatagcttatgaaagaaaaaaaaaaaatagtagtactcagaaggaattagtcaataattgaagtaaaagaaaatgattcataagaattgttcctgactatacattaatttaaaacattttttattcacggtgtttgctatggaaatttttttctacattttttttttgtagatgcatagttgataacttgatgcctatattcgtagtggaaaaaaaaaaaaagaaaaccaagattaatattatttatttggacggttgtgattcttgtagatttagttcgatgctgtaattttaggaagtacatcgattgcaagtttgaacttgttacgcagtcgaattgttgttcttcatcgtctttacatttttcaaagtacaatggaagacgatggagtacaccaaatgttgcaccgaaatagttcagtgcttgaatttaagccatgtatgtaatcggttcctgtatttttttttaattattagattagataatcaaagtaaagcaaattaaaattattagcagaaaatgccaataataaaatgtatcataaataccaagaagctacaataatttctatttccatgtcaacaataatgtgaacacatctacgaatgtgtcatgactaggaaaatgttcataaaccatgcataaaaaaccgaaaagaggatccaagcaagagcagaaatgaaaagactcagaagaggtcgttacatttacaacatagacaaaacactagagtctggggcaaaggtgtataacagaacaaacttacagacatttggaaaatcttgtttaaatttataaaagtaattcataactattttaatctattttaataagtttatgaaaagattattaaaataaactattttataacttatcaaatagtaaattttacgattaaatttatgaatattttgtatttatagaaaaatcatttaatacgtatttaatgaattaattttgatctaaagatactcttaattcttaattacaaaaagagatatactccgcgctatacttatgctgcaaaaactatacaataatgtttttaataaatattatggtgaaaaaatactacataatatttattcatgagtatatatatatagggaaagtgttaatggtatagttgtaaagacataatctacgcacgccgcgtgagttgatcctacttgccagttccttgccaacccttctctctctctttcctcacactttctccaatctaacaagtgccagtgaatcctgatctgacccccaatcactccaaatcaatatataaataaataacctaataattcgaaaagtgtaaaaaccaaaaagaatggttttccaattttaattaatacaacagcaaattataatcctaaaacaaaacccggttccttcaccgacgaaattttaacccttttttttcttcctccgaattagacattaaattaatgtaattaacccaaaagagaaataaatcaattttgctttagcattattcattcatcaccagactccaactgggccccacctaccacctcactctttactaactcgtactccttcgtatttttatttttatttattataatttcggtgtgttttttcctccttttttataatcttagctttgattacttttcctctcgatctcactgtcccccccccccccctctcttcttcctcttgtgttgttgtatctccttctctcttacgcgtcttcatttccaaacacacaacacacaactctctctctctctctctctctctctctatatatatatatatatatattgttcgtgttctcagcactttctctctctaaaagattaggaccagccgtcggtggctgccttctgaaggaatcaaagtgcacacactgcacgcacaaccccaacactctccactttctctctctttaaagaagggaaattgtttttggtgtttttcttagttttgccccgcaattggcaattgcgtgtgtgtgggaagcaaaaaagaagaagagagagagtgattttggatcttttggttttgtgtgggggaggtggggtgtgatgtggtggtgttgagcaatgcaagcgtggatctttttcttctgaaacagagaggggttctcgatttgtagaagaaaaagaagaagaagactttgtgagttcaagagttagtgatgcacaccggaggaagactcgttgctgggtcccacaacaggaacgagtttgtgcttatcaatgccgatgagaatggaagggtaacctctctctctctctcttttgaactgcatagggtttttgggacttttttgtctaaataaatttgtgctttatttctcttccgatctctttttctacgccaaaaaagtgtccatctttattgttttttgcactgtcggtggtctctttaagcagtctaatgcggcttctgtggttatcctgttcttatttttaaattattagcttgtcgggtggaggtgtttttatgaacaaaatgggttgtgagttaaaaattggatttttggttttcgggggataagcttcagatttaattgatcgtggttcggtttgagggttgacccttctggagcgtgtttgcaatgtgtgaacattgtgtgtgatttcgctcgtgaggttagctgaggattagttgatcagtgagggtggaacaattgccaattgttttatcagatattggaagatttgatgttgatgtgtgacctgattagctttgagaagttcagtgagaggagtgtgtgaataaatttgtctgtttccctgcctatgtgacttgaatttgtacaacctttaagttgggtaggattttgttaatgaggaatgttattgggtgattggattgtttagtttctccaatgattgtaaattaggtgctaatgacattgttgttctcttgttttgttgttgtttctgctcagattaagtctgtccgagagctgagtggacagatatgccagatttgtggggatgagatagagattactgtggatggggagccatttgttgcctgcaatgaatgtgctttcccggtttgccggccttgctatgagtatgaaaggcgtgaggggaaccaggcttgtcctcagtgcaagaccagatacaaacgtatcaaaggtgagattggttttgtgcttcctctctttgactctggtatcttgttactgttgtggaaattttctcacagtgttaccgaagaatgaattgcaggtagtcccagggttgaaggcgatgaagaggaagatgacactgatgacttggacaatgagtttgattatggggatgttgatgctttgggcccacaaccaatgtcggaatccttttattctggacgccctaatactgggcgaggtgctaataatggatctggtatggcgacaaacttggaacatggctcacctcaaaattctgacataccgctcctgacatatggggaggaggtagtatattgttgaatttcccttttggtgtgcctgattttcattctgtgtggggatcacttcacactggcaactgattctaacgaattaccgtttttgttatttataggatcctgagatatcttctaatagccacgcgctaattgttccgcctcatatgaatcatggaaacagagtccatccaatgccttataacgatccatctattccatgtaagtgctgtacaattatctatttctgcattgttaaattttgtgttgtctgtatatattctcaccctggtccttcttttgttatagtgcaatccagacccatggcccccaagaaagacattgctgtgtatgggtatggaagtgtggcttggaaagaccgcatggaggaatggaagaaaagacagagtgacaaacttcaggtggtgaagcatgaagggagcaatgatggaaattttggtgatgattttgaggactctgatttacctatgtaagtctccaattcaactttttattttgcttcatttaagttcctaattatgctccataattagagtggatactagtgcacctctttacaacatcaaagccatatcattttgcattaggaagacatttcagactccaaatcaatgtaattgcaataggtggttgttggatacatgcatgcatcttagccatgaaatctgttattgttttgttagttaggtgttgcagtatatgcatgtgcacttgaggcaggaggatgcaagtttaactagaatggaacaattatatttctctaatttttctacccgatacttttgctttgtgtattgacatttttatcaatatattataacaggatggatgaaggcagacagccactttctcggaagctacccatcccttcaagcaagataaatccttacagaatgattatagtactccgccttgtcgtccttgggctctttttccattacagaattctccacccagttaatgatgcatatggcttgtggttgacatcagtcatctgtgaaatatggtttgctgtatcatggataatggatcagtttccaaaatggtacccaataaagcgagaaacataccttgatcgtctgtcgctcaggtaatcgagcctacctaccatttctgttgattttttatttcttgattttgcatttattctgtacccaagtatatctcattctaattttcatgcttaaaagtcctactatgttgctcaagattggctttttacattcctgcaggtatgaaaaagaaggaaagccatctgagttgtccagtgtagacgtctttgtcagtactgtcgatcccatgaaagaacctcctctgattacagcaaacactgttctgtctatccttgctgttgattatccagttgataaagttgcatgctatgtctcagatgatggtgctgctatgcttacttttgaagcactgtctgagacatctgaatttgctaggaaatgggttccattctgtaagaaatacaatattgagccccgggcaccggaatggtactttggtcagaagatggactatctgaaaaataaagtacacccagcatttgtcagggaaaggagagcaatgaaggtgtcaactttttctttttaagtaatttgcttcttgtgctaaaagatgcaatcatttgactctgctaatggtctttttcattttggctgttacagagggattatgaagaatttaaggtgaggattaacagtttggtggcaacagcacaaaaggttcctgaggatggatggaccatgcaagatgggactccttggcctggaaataatgtgagggatcaccctggcatgattcaggtaagaagatatatcagtttaacaaacatcaaaaatagtgtttgcatatgatgttgttaggcatctcatggatgattttgaaaactttttttttccctttattttgttttctgttaaatcaacaagaatttgggttttcttaacttttgataagttgtctggggttgatatttgtttcccctgtataaatacattcctctgcctgatgttcaaactaatttgcattatagaatgtaagcaatcatgcattgcaagtagacctgcttatgccacctttctgctttagctagaggatttggattctagtcatcacatttcactgtcttgtgagttagaaatgctaaagttttatttttttttgtattttacaggtcttccttggtcaggatggtgtgcgtgatgttgaaggaaatgagctaccccgcttggtctatgtttctagagaaaagaggccagggtttgatcaccacaaaaaggctggtgcaatgaattctctggtaagtatcaattaacttttattttggttcaggttcagatgatgttccattgaccttaaataacttgtttttgtaatgatattaaatatgtgaaggtgcgggcatcagcgattatcacaaatgcaccctatcttctgaatgttgattgtgatcactacattaacaatagcaaggcacttagagaagctatgtgttttatgatggaccctcaacttgggaaaaaggtttgctatgtgcaatttcctcagagatttgatggaattgataggcatgatagatattcaaacagaaatgttgtatttttcgatgtaagttttctcttcccctttactttacttgtttgactgcttttcttttggtcctttagtatgacagcttctaactccccaattgaaaacagattaacatgaaaggactggatgggatacaaggtccaatatatgtcggaactggatgtgttttcagaaggtatgcactgtatggatatgatgcacctgccaagaagaaaccaccgagcaaaacttgtaactgttggccaaagtggtgctgcctatgttgtggctctagaaagaaaaagaatgccaacactaagaaggagaaaaagaggaaggtgaagcacagtgaagcatcaaagcagatacatgcacttgaaaatattgaggcagggaatgaaggttaggattttggaccatgtggctgtccttacaaatcaaaatacatactgtgagaaatttccttaataataatactaaataaattcttttccaggaaccaacaatgagaagacatctaatctgactcaaacaaagttggagaagaggtttggacagtctccagtatttgtagcctccacactcttggataatggtggagctccacagggcgttagtcctgcatcacttttaaaagaagccatccaagtcatcagttgtggttatgaagacaaaactgaatggggaaaagaagtaagtatcatagaaagaaaattgttttttaaattctttttgaaaaattagtcttctcattcttatatttcttctcttgttcctaatcgttggcttgctaccaggttgggtggatatatggttctgtgacagaggatatcttgactggatttaaaatgcattgccatggttggcggtctgtgtattgcattcctaagcggcctgcattcaaggggtctgcgcctatcaacctttcagatcgtctgcaccaagttcttcggtgggctcttgggtctgttgagatttttttcagcagacattgtccaatctggtacggttatggtggtgggttgaaatggttggaacgattttcctacattaactcagtcgtatatccatggacttccctccccctgcttgtctactgtactctaccagccatatgccttctgactggaaaatttattgtacctgaggtatgcttatatgtcttttgactggaaaatctatttgtctgtcagtgaagaaatccctttcatatttttccttgcccaactaaggaattaaaacaaaagaaaatgtagtatttggattgttgagattaaggctaggatctggctcctctgaagtgtaggtgaactttagagggaatagtgaggggttgttggaaaatctagagtagattttataatctaagcctttgatttataatcaatggttataaagctggattttcccttttcaagtgcactcaccatacaggagctaaattcataatgctatatgtgggaaaactagaatgaaattgatttggagcatctaaatactcgtatctgttgaccttgccatcttgaaactattttggaggttaaggttggatttagtaatttggatgttcttgtcagaaataatttcggcaatcatttataatataaaataggttatgatactttgtaaatcggtgtaaataggtaaatcaaaattattattaaatgaagataaacgaaaaaaatcatattactgcatcatttgtgttcctgtaattttaaatagttggattttactacaaataataaaagcgctaggtatagacttgttgggttactaacatcaatatttctgtctcaaatgcagattagcaactatgccagtattgtgttcatggccctcttcatatccattgcagcaactggcatccttgagatgcaatggggcggtgttagcatagacgactggtggaggaacgaacagttttgggtgatcggaggtgtatcttctcatctttttgccctatttcagggtttacttaaggtcttggctggtgtgaacacaaacttcactgtgacgtcaaaagcagccgatgatggagaattctcagaactctacatcttcaagtggacatcactcttgatccctccaatgactctactaatcatgaatattgttggggtggttgttggggtctcagatgccatcaacaatggttatgattcatggggacctctctttggtaggttgttctttgcattgtgggtgatcctccatctctaccccttcttgaaggggttgcttggaaaacaagatagaatgccaaccattatattggtttggtcaatccttctggcctccatcttgactctcatgtgggtcagaattaacccgtttgtgtcaagagacggccccgtgttagaaatttgtggattgaattgtgacgagtcgtgaataaagaaaagctgaagaaggttagttatttttcagctacactgcagtcatgttgaagaatgtagcacatcatgcttcacaaagttgcacgaattttcggatggaagttttatttttcgggtgtgtagagattaaagagaggaagggggagggggctgacacattgttaccttgtaataggggtttttcatttattctttgattatattttctgtgggttttagtgttattctctttacagtttcatgtattataagaaagaggcattgaatgataaattattccctcttcataatgggggatcctcagtctcaagaaattagttgtcatattttaagttatggtttttgttcttgtttaaaaccttttgggacatgggctatcttcatttgtaataccgtcaaaactatggatattcttgttcctcagatgtgtttttgtgtttttattatttgacactcaggaacctcttgggttggattcaattattgaatgcttggttggcactagaaacatgtgttgtggagtttgttcctgcaagtcgctttttcaaatttattttggacttttgtgatctgttgtatcttttcctgttcaaccccaccactaaaaatagtaatgttattgcaagccgagggatagctatttgactatttcaaattcaagatctggtaatcaccattggcacaattattaggtttgctaataacttctaagaaggaaaatcaaagtcacgaaaaggttagcaaaattcttctctgcgagaaagcaattctaatagtgaaatgtcttggctgctcacttttaatatatttaaagtataaaatagttttatatcattaattaataaaatagtctaatatgattgttaagatattgtaaaagttaataatttattatacatgctgatttattattaaagtgtaaagttgtttttacaatgacatagcatagcctattttctgttaacattggaattcagatgacacgatccatttagcgccaagttcctgtgattattttcctcattttttatgggagagaaatgtgcctgaactcaactctgaatactattttgtcgattactcatttattggataacttgtgccaggataaaaagaaagggctaaaatggctaaaacgaggattctgatttaaatcagtgagcattcgtactgtttgtgaaatacagtttggtctgtaatgggccaggtcaaccattgggcccatttttattttcctttaactatttaggcttaaaatgctgatctaaagtccaaaatgttgtgtcagaaaataatgactaattactgaaaaagttgaatgtattactagtatagtggaggttactgttattggtaaaaacgataattaaattcaaatatttgagtttaaaattaatacaaaaacataaagtctacaaggtttgccccataccaagtccacttgatccaatctcatcatttgcataagtccattattgatgatatcaagtataaaactttcacctttttctttgttgaaactattcttcatataatacaacataatttacattaaatgcaaaataatttaaaattctacttattgagatgatatcaagctacttactggttagttttttatataatgactaattttacgtcaattattgatttattgttagcagtctcaatggccaaggagaaggtgcgagtttttatctgaaagtaaaagtaaaaaaaggtaggtgtgtgtgagccagggcagattatgagcatcggatagttttctgtttcactaaatctaattgggctggcaccgtggtctatggtacgtagttttggtatctgctaaaaagtaatatctatacttgaaaaatcgatcatttaaaaatttattcaattattttttctctgttaatttaaccaaacatgcccacttttagttagctctggaacgaattgcattagggaatgatgaatgttatgttttctttttctttttttttggcaaaaattattcgcaaacaaattatggcctttgttgaatgcacatgatgatatcagtcccttgcaaacaatatttaatttacctagtgtgagcttcgtgtgtgtgttgtatgttctgttgtataacgcgtacacaatctgttatttttattttattttatttttttgtgttgcatagcacttcttatataatcattaagtacatggtcaaattttagatatataattacgttaaatattcggaaaaaaaatatttttttagttataataattctatttaattcgaacataattacttacaataccaaatacttgtgggctaaagtaaaacagatacttctaattgaaagagttgagaaatcgggaggtgataatttacacaattgctttgcttccacgttccaagcttcctgacttgcataagttaattatatgccttaattttaaggaaagcgcgtgacagaaagaaaaaacaaaaaaaaattgggagagccttgttgataaaattaatgtttgattaattttaataaagaaaacaagtttacttagtcaaataaaggttcaggcttcagacaaccaaaaccttacaaattgtgaccttgaatcaactcttccactttttttttcccctttttctccccttcctttccaaaaacaaaaatacgttgggaaagtttttcagcacgtaacgtattctttaagaaacctgagaaagatagaaaaatgaaatgaatgacgcggatagaagaattcttggtaatcatttttataaagttcgtttattggaatagtttatgttataatattaaatatttatttaattaattaatataaaatgaaagagtctaaattatatataagaggcaaaatcatggaagtgtttaattaggagtttggataaagagaaaagagtcaaacatgtttaattaggcaaaatcattattattattggctaaaagaacttgaacaaatttgaagttttccaagagtttcagaaagtggactctttcctgagaaaaacaaaaacaatcttgtttagaaaaagaagaaaaagaaaatcatttgaatagtaaattctacgtatctctatcaaggtgtgttccaatttctacacgggcagcgaattagccaaatgctgctgatctatgacttgggtcaactcaactcaagctcatataccacgtctactctataattcaatttctcgatgaaagtaatgataaaaagaaggatatgaataatcagtatttttaaaatataagttaaaaaattaaaagtaaaaaatatttattataaaaattataaataatataattttatgcattttaataaaaaaaaagcatttttttttagtttcgtatttagtgtcctaagataccaacaaaaaaactgtttaggactttgggtgcattattacccttttaaaagaaggtttttttcttctaattatagtacccgttggatggccgaccaataagtcaaagatgagatcacaaagatcaatccaacggttacgagtcgtttttgaaaagtacggaaacattggacgattctgatttatgcattaaataaataatataagattgtcagcttcatagaaccaacctcggagtttctatccagctggtctcgttcttttctaaattaaaacccacaaaacacgctaaatgctaaagtacataataatatggtgataatttgttgggctgtagaaaaacacacgcatattatcatcattaagagtgggttctaagtgcatgcgttaacataaatctctaatggcagaagcaccttcttctcgtaagagtgaggtcgtgaaggatcactgcttggtgataactgaatctgacgtggatgcggcacagaacctttcaggaagcaagaggagcagaagcatggatgaagaaaagggagaagaggttgatcagaggctaagtgatattataatggcgaaaatacaagagatttttgggaatgatatagatatagaggtttttccaacgaagaagcaaaggagatatcggtctcttgtgagtatttacatggtcacaaggccggttaatgctggaaacgatagattaagggtgaaggcatgagaagtgatggcaaagttagtaagggtaattaatatatactaatatatattaaaccctcaactatagttttaataattgttaactgggtcagtcccagatttttgttttgtagaaaagtttctctccatcgcaacttcagttgtactctttctatatagagaaatgtcccagaagcagtagtgttgcgttttgtcgttaatccgttagatagtgcatgttgatttaatattatcgattgttgatgaagaatgatgcaaattaagtacgtatcttgatttggcagtttgtttaaattcatccacctgaagctttcatatatacagttgtccaattaacgcatttcattttctcttatcaattagttcattctatggtgaggctgtgaggagaattgctttaatttgggttgtcatcaacgagtgaatgtttaacgtaattttgtagcttcttccgagagtaattaactggtttttgttttcgttttggtgtgtgtgtatacttgtgtaagacctatgacctatgattcttctaatggtgatggaggaatgaaagataaatttctcaggtctccacagtctccacacatgcaaatgcaatgtggtgtttgttaatggatcgaagctagctagctataaaggattgaatgtgcaacacattcatgataatacttagtttgttgacttgtattaattgcaaaatgcaaaggttcagaagtttggttttgcgcacacaatttttgaattgtccactgcttccttttgtctagacttaattcagaaataataaagagtacttggatagtaatgaaaactgacggagatcgatccacacttggtcatgctaagaactcttatatatttgcatcttgtaaattaactaggacttttgttggtcttaattagatcgtgtttcgtctcattttcctaggggagctaattacagaagaaagcacatgagatatctcgatcaacggcaagttgttatttacattgctcgaggaagtatcagttgctgcatttatatttaagctttccggcctttcccacttcgtcctcgatccaaattctaaagagcttcatcttcaaaatacgtagtattctaaattaatcagccagtgctaaacacacacacatataaagtacatgacgtagttatgtgatcacgtattaaataatcttaataatttatgtatgattatatactttagagttaagttttcacagctttaaaataagaattatttttattttatacacactatatttatataagaaggataatattgcaattcatgctttgatattttacaacgcatttttataatttatttttctttccttttttttctctctttctaatagatatttcactttatctcatatatctttcttttgttcttcctatctttatcatttccaaaaattaatctagaaattctattattcatgttttctaaaaaaaataatattataactaggagatagaaagaaagtggagagagaaatataacaaagatagagaaaaaaatgagttatcagaaaaaaaagccataaaaataagttttaagaatatatatatatatatataaataaatatataaaagaaaaaagttataatgagttttgcaaatataagatatgttttttcaggaaatattagttattaatcaagtctatagatacttcacatagataattaattgaaattttcaaagttatacattctcgaaaattcgtatattcttcttgttgatcgacggttattacaataacaaataattttgtcatatatttaatgccaccaagatatgtttttagatgagctaaatgtctcttcaatatagccgtatctctttctggaagatatgttttataaacataggaaaaagaaaaaaaaaatataatatacccttcagggttaggtgtattcaacaattttttgaaggaaaattaagtcgctgataaaaaagaaaaagaagaaggaaaattatgtttggtatgagtcaggttactaaaaaaagaactactgattgcctttattgaactatagtaaattatatttattggcgatcttttatgattaaaaacagaaaaaaaaaaaaaagatgagagtctatggatcaatttgaaaagtcaaatgacaaaaaagaaaacattgcattcattagctaaattggtcacaaacgtatataaagcatacaccttttgggatgaatatcccgggagtaccaattcgtgagaacaagtcaacaagtatcctggacatgccgactcaaggcacaaggatcacgactcacccttaagcattgagtctgttgtacatcattcaagatggatatctcgggaataccgaccttagcaagagggttgacttgccctgtgtgtgcaaagccacagctccatgctagaaggacttgacatcccctaaggcagagattatattcaaggtgcccaacttacagcaatgatatcaggagcagataggaagaatgaaacgatagaaggtacagtacaagacagtactttgttaatgtggcaacaagataaaaaaatcactgcggcttgacatgtcaggaccacacaaccacacatcctatactgtgtacgagaggaacagaactgaggaagcacaggagcatggcaaaaagggaccgataagactgtgcctagtggatgtcaatgtggaggagtaccatgtataaatatagaggtgaattgtatgactcaccttaggttcatggttagacggaactaggaggagacattgcaccctttctccttggtcttctccgacgtgaaaatagagatacactcacgtatctataaacacagcctaagtactaagaagggtaacggaaattttcctggtatttccctaaatagttaacgtaaaacttttgctctaataaagttttaggtatgtgcttagtataattcttacaagaattgcttcaacgccatataatctttgagcttagtttaacaatgacacgaatgattaataggaagataataaaatgcagaccagtgagcccccctcctcccaagcggagacattcttccccttccaaccttcacgtggttgtcttgatcatgaaaaccatataacaaaatgtctaactagctacccacaatctctggctcttctatgtatgctgatgtatgaggacttttgtatatatgttttctatcctaatatttatttagtaaacaataattttaatcaatagttcataaaaatcatccaaccaccattttgttctgtcacgtgttgattgtatgcgcattttaaaaggatttgtctcttctaaagtgcaccagagtaaagtacacaaatcttgacccttcattataacaaatggctgaaattaataaacttcaattaaatttggcacatcagatttttgttttcttaaccaaatattgaattaaaattaaaaaaaaaatcattgaattctgtaaaaatgaaaaagttattgaattaaaatagggggaaaataaattatttgccaaactctcccaaatcaacaccgactaggcaccttcccactgactccatcttcatctacgtcgaacaggaaaacgagttttgccattcctacatgcttctgattcttgcaagaattgcactgtattttgtaaatgaacccaagaattaatctttttttgtacttaaaactaagctagctaaaagcaaaaaataagtcctctgaaagtacaagtgtcacgagcaaagtatttaggtagtgaaacaatcatatatacttgcttgacaccaaagcataaaacaactgctactccttatccaagtccaccgcttggaacagataaagtgaataaaatataaggtgaattccaagcttgagaacatagcttcaaaacggaaacatctccgcttcaaaacatcagcacgataagcatagtaacttggtgacagattttctttttgctgtttgaatctgttgaattttttgtatcaactgcttatagctccttttatgatgaatgtcaaatctttttctgttcacgaggatgatcaaatttttgtgatcaatcaagatgtatgattaatgaataattctggacctgtgaggtggagagaacctaaatacggaggcaacgacgatgggttgaagtttagtggaggatgatttggactagggtgttcagggagtgtgagaacaaatttgtttttttttttttaatttaataatttattttttcaaaataaaaatctgatgagtcagttttaatctcaactatttattataatttaggactaagattagtgcactttactctccaaagtgcatggtgcactttagaggagtctattccattctaaaactatgtgctttacgtcaattttttattgctctacacctctcattaaaagcatgggccactgttataatttttttccttttatatattaacaatattgacagtactagtagagtagtagtattatatttcttggggtctagggttcaaaagtacgaacttgggaaggagggcatccactgaaagcatattagggtcacgggtgactttaggtgtcattatggcattatcgtatattaaaaaaaaaaaaaaaaaaaccttcacattgtcttcgtaggaaaattattgaagttccataaaagcccaaaaactttaaaatcacaaaaaggcaaaaatagaagatattctacattacacatgatgaaacgccatggcatgattgtcaaaatgcatcgacatgcgcaacggtaaactgatcctaaatgtcgccaacatcaggacattatcatctctgtaatcatacatctaatacaattaatcaatctataaactagaacttaatggatgaaaactaagaccacaaaattatgcatattgtatcttcaggagcctcgaggcatgcatgaactttcaaacttcccctttaaacttggcttcgtacgactctggttgctgcaaaacaaacaatctcttgaaataaatatagaagaaaagttttaccatataacattaggaactataaatttaaaggggagaaaaaagaaaaagggaagagagaacaaagacattcaggccacacatgatatcatggtaatgtgatcatcggatatgatgatataaatactcttacctaataagactacaggaattcttatattctaacccgcggaactaagctctcaatcttttacatataaatacactaaaataaagaaaaagaattgagaaatatacacaaaaccatagcgttatagacatcccaaacattgcaggagagactactgaaaaacctgctgatactaagcctcacgtaacgtagcccaaggatctgaactgaaatatgttgatgcaaaaggataaccggtaggatggtattcgaataagagggcacctacttagacatctgaaaaagataatataatcctagaaaagaaatacctcgagtaaaataaataagttcaactccgactatttcatgcatctgaggaaaagtatatgaaaattcctctttatagatccctttccgtccttggtgaccggttgatcatggattcaaattcaaaatcaatctttttgcatatgtaaggataaaactgtgtataatgacctctttcataccttccgcataacgaggagcctctgggaccgggatacattagtattttttttaatgcgaagtattttattaatccttctgtacagaaatgtcatcttgttctcaatatttttgcaaatatcattaaaaacattaacaaaaaagaagacgaccaaacacctaatttattatttattattataaatcacgttttcaagtccaaaggcaagaaaggtggaactcatgaataaaaagattaccatgaagacagctgaaattaatctgcgtgcaaaccatctcaagtgcattgcatgttgagcagcacttgctgcttccactgtatcaaaccgcaaatacacaaaacctgcactttttctgtataggtgaaaccaattaatgaattgtaactcacatgtaatgtggaaattaattattattattttaattaagtaaaagcatgcagtaaaattattcatgattattgaagtgtgttgcacatttatgagcttacttgtcaacaaaaatatgcttcactcggccatatttagaacactcttcctctacgtcatctttaatgtctatatcaaaatctggttccgtctgcattgcaatgtttgccatcagtactttgttaaatgacaaatcacatggtggaagtatataatcagataaccacagacctcggtgctcggatcgaacatattctttaaaagtaaacactcgctggggtttcctacaggttctaccactggattaggcatgacttgcgttggtagaactggtgcaccaataggcaagctgatagtctgctgagcaggaactgagccattaccaacaggcaaacctatgctgcaaagttgaaaactgtgaagataatgaacagatttacaaaaatgagcaatattattaacgacataccttgcagggtcagcgccagccagtctctgcataagcaatgctcttgaatgagcatttaaagtctgcatagcaaagcaaggcacataagcaaggtcttcattttgaataaataacattgttagtataccagggggaaaaacaacaaacaaagatgtaggaacagagaagcttcctaaaaaaccctcagacccgtccccaactagaaagaccgtccccaacttgaaagaaaagttgtttctgagtgcaaaaagagagtgaaaatacataaaagaaatcaatcttcatctaattcgataagagggaatcctgacagcacctgcttctaaactatgtccagaattaacttaaagtttatgtgctgatgtgcaaatcctctcagcactaaacttcaatgcaggtcagaatcaatccataaacatatacggtgaaaatcattataaatacttaagaaatacattagcaaataacacttccagcctatcaagcttctaagaatctggaaaaataaccatgtaactaaaatgttatacttataaaacttcaaggcccatttgtttaagcaaggaaaaaagtgattctatgatacaacatttttagagcttttgcttagaagataaaattttaacacctgaggaaaaaaaaacaatttttttttttgaagagtttgcattgatgattataatttttttaaacatatcttttaactgaaaaaaggggggtctttttctttaaagcacaaacaacttcagtaaatttgcgatattgcatgatgaggtatagatttaaaattttaaatgacacatcaccagtttttgaatattttacataacggaagcaaacttaccaatccaccttcatcgtcatccaagtctgcagattttgcagttgcatcttggcttgcaacatgatctgttacacatgaaacctgaatttgatgctcaatatcagtcacaaacaaaagaactgacagaattatcatcaacaaaattgaaacaaaccagagaaaaacaaattgaacaacacatatttctaccttgatagtccttccagcaatctccaattttccatttaaactctgagcagccttggcatgttctagatgagtaaactgtccaatgaatgcaaataattagataacaatgctacctaaataaaaaattctcgaagttaagagttagaaacgaacttgaacaaacccaaaacccttgcagtgtcctgtttccaaatcaagaggcagttggacaacctcaactggaccaaatggctcaaaaatctaaaacaccaaaaacaaagtatatcaaatgatgataaaactgcggaaataagattcaaattggtgataacctaccaatacactagatccagataagagaaacttaattgaatgtttctaaggagatatgaattttgtaaagttattggtattcaataaaatcatgtgcatttgtgttcctaataaatgtagcaaagaccaaaaagaaatatgccgaaactctccatccacgccacaacagcaaataagacagcaacaaaagtaaaatacctcccgcagctgactctcagtcatgttgaagtgaagattccccacatacaattttctgtccacagctccatagggcccagctacaccagccgctccaccagaagcattagattgaacaaggttcttttcagcttcagaaggtttcaccattacaggttgcccaagaagaagttggccagaaagagcaatagccattggcactgacatcgaatcataaaattcaatatacctgcatcaagttttcagaactaataaacaaagttgcaacaaaacttacaaagcatacagcaaagagatgtagggaaacaaaaactctagtgcagacagctcaagctgagtttcatttagcctgtcataataaacattaaaagctaaagcatgtattaattattaaattgacaattcaatcaggagagaataagagaaaaagatatgagaatataggaaggaaaccatcgagaccaatgtttttaaaaccggaccagtcattgaactaatcaaggcactgatccggggttcaatgttcaaccatggtcgaactggtattaataaaataataataattcaataaatgcataaaataatatgaaaacacaatataattttataaagctaaaaataaaatataatgctatagattcttaatattcaaagtacacaagaaattcaaaccaaaatctaagtttcaacaatacacaacaatgttcattaatcataataagtttaggtttatttttcatatttttatggaaaacaaatcaaaataacattatattaagcagtttccaataacccgttgtaaaccggttttctggtctgaccagttttcacaacagtaattgagacaggaagaggcagaattagcaacagtaatagactttggctatatatgtatacatgggaaaatccaatcctaagaaaagaaaccatatcaaaaactggcagctggccttgctcaatatttcacttgtcatataatagtaaaagtcaaacagaaccaaatccatgagcatctcatctagctacttatagccattcttctaaaaaaaaaatacagatagatagaaaggagagtacaatttcctccatatcaaccttaccaagccccacaaccaatacaaggggcttccaattaataaatggaggaaaatgaactaaaaggggtatcagcatacaaatgaaatcctcattgtatggcatgcagaggaagaaaattgggaataggaccaaacagaaaactaggattatgtcatctaccttgagtgcgcagcatgaattgattaaacatgagtgcaaggtattcccaccatccctcatcattatcgcattgctagtccatttaaagatacagttaaacatgattcttggaagttcatatcctaataccacaatagcacatacatttaaacaataaattatttgacaataaaacacatacccaactcctttagatcgtcttgagttcctatccatgatcagacggacatctctcacctaaaatgaaaggaaagaacattaaacttgacggacgaagtacctcatacaaaggcaaatatatgacattcaccctaagcatgcaaaccaaacaccaaatttgtgacgttgaaaatatcatcatgtaatgtaagtatgtaaccccatattcattcatcgcacaaacgaatgtcgagacataataaagttgctctcctacttaaaactgaaggcagaggacaatatactgcaacagaaaccaaatgtctcagaataagaagcattcagtatgcttgtaagaacttttacattgtatataattgttatcactcatcatgaatgagaagcaacaatatactaaatacaaaacataaaatacgataatattaatagtttaaatgacaacagaagtcaataaagttccaatggagacaaaatggtttgataggcaagtcatcacagttccaatggcaaaagtacatcaaatttaaaagcagctgaccttgccagcttttgaaaagaactcatacacatctctctctgttgcttttagcggcatctgaaaccaccacagggcaaatagccaatcatcagaacaagacaccaaatatccaaaaatgtagaacttatatattcatataatttaaaacaaacaaaaataggaacctccaatcaacctggtaggcaaaaacagttctctgatccctttctgggtctgcctcaggttctgcggcctctttcttatccctaaatctcctgcaactcaaattataataaagttattaaaaaaaaataaaagagaagttcatattagttaatttagaatcctgctaaatcttaagagtcagactagccaaatgaatgcctatggccccaaggtgataggcgcttaaaacttaaaagtatacaccttagtaaaaaaaaacagagatatgttaatgccttgcagtaccatagcaatgatatgattgatatacattctcaggccacctcaaggtcattaacggaatgagaattgcaaacagcaaaatcacatactagagtattataaggagctgcagttattcaactacagagtcatctagcttctagtagaagttagttagacagttactgttagactctaacaaaattgtctatatattctgctttgtaagtctcgattacttgggttaatgaataacattttactccttcattcattactttctctctctctctctctctattctctcaaactaggaaatctatgattgtatcagagcttagtcaatcatcaatggcaacaaactgtgtttcttcttcttccgcttccgcttttctgagttcaatttcacacaagcttgatgatttgaatttcttattatggcaacagcaaattgtgcctgtcatcaaatctcacaaacttcaaaggttcgttatgaatccgcaagttccattacgatttcttactgaagcagatcgcaatgcaggaatggagaattctgcatatgagacgtgggaacagcaggaccaggttcttctcacctggttgcaatcgaatctgtctatacatcgattctgtctcgaatcatttgttgtgttcattcgtatgaggtctgggaacgaatccacaattattttcacaaacagacgtgagccaaagcaaggcagcttcaaactgaattgcatgcaacgatgcttgaagataagtcgatgcgcgagttcctgcttgggatcaaagcaatttccgattcacttgcctctgttgaaagtccaattgctcttaaggaacacattgacactatacttgaagggcttccgcaagactatcattcagtaatctcagttatcgaaagtaagttccaatctcttcctattgaagaaattgaagcactgcatttagctcacgaagctcgattgctgaagtttcgaaaaacatacttctgaaaggagagagagagagaaagaaagtaaggaatgaagaaggagtaaaatgttgttcattaacccaagttattgagacttacaaaggagtatatatagacaattctgttagagagtctaacagcaacagtctaactaacttctagctactatcttctactagaagctagatgagtctgcagttgaataattgcagctccttataatactctaatatcacataaaaaatatataacacgaagaagctaaaatgcataaaatctaccctcaaacgatacaaatcctgtcacatttctttaaaccaaatagagctcttattcccaactcaatccctcctttcacttgaaaaaaaaaaaatgaattgtatgaaggacaaaacttaattatcgttctttaggtgcttttggtattgttctccaatcaaacttggtgttttgctgcggtaacccacatcgtaaaggtttccattaaagctcaacatagattaccaacgaaaaattccaattctgattagagaatcgtaccgaaagtatctaagacactgtatctaagttcagtccttgcgtaaaataccgcacagttccaaccaacatgaattatagccacaccattagtcttacaaccatagacaaaactttttaaaaataattttgtaaacatatttcaagtaaaaccagtcgctgaaaagtatcaactacatagcacatactaagaaaaacaccaatccagtacaaaggaaaaatgcagatcacatcaccaacgcacacttacttatgttttcttttatttatatttcaccatatttatgagcatccattcaaaccatttacaaactaaaaaaaattaacccaggttcacaaagaaattacacaaaacacaaaggaaagagcaatttaccggccatcgcgcatttcgaaatctcgctccctgtctctatccctctcagagcgactcctgctccttgtggatctctccctcgcctctctttccctctctctctccctatccttctctcttctctcgcgctccttttccctatctctgtccctatcacggtctctcctatctctatccctatccctatccttatccttatccttatccttatccctcctctctctatccttatccctgtctttcctctctccgtctctctccctgtcgctcctgtgacggccggaggaacgttcgcggtcacggtctctctctctgtctctgtcgcgatctctcttggaaccaccgttctcgtcgtcgccccttggtctcttgctctttctgtcatcggcgtcgagatcgtcgtcgacgtcgcggggcttccggtaactcctctcgctcttgtcggtgatgtccttcttcttcttggaggaaccattatctatgtcttcctccactgtcttctccaggtattcgtactcgtcgaagtccattggttcctcctccttcttcttcttcagctgaattccgaatttctagggttttagggttttgtttactctcagtcttcccagaggataacagctgttgcttcctccggtattcgtaacagtattatagaagctttaattcacatccctactaaaataaatattttcaattatattatgattaaaatttataatattcctatcataaaaacatatataatacttaagataaaggctagattatggagtttgttttgatcttatattttaaatttcctttactagtatctatctcagttataattttgacatatttttaaaaaaatttatgtatttaaaaaataattgagcttttgttttattaaaagtttaatttatttttttatgatttaaatttgatcaatttgaagagtttttgtaaattgattaatatggttaataattaaaaaatgacaaaaaaacaatatttactagtttatacgtgtctttgtatgcataattaacatagtggtcatttttaactgatgtaataatattaaaaattaaataattccttcattgacttaaaaaaattatgtttaactttttatctgatttttatgaatttaaagttgattgaggaattttcttatcatatttcgaacaatattattaaaaatcaaataatttcattaaaacgtgtgataatcaaatactttcttgtgttacataattcaaattattttgattaagagattcatgtcatattttttatgcaagcagcatattaataacttgatttattacataaaaggaacaaatttgatcaagttttaaagttaaaaaaacttttttttatacaaatataacatgatttgctcaattattttcatctagacatttattcactataaaatttaggacattttgattggaatacaacaatatagagtaactcaatcaaatttgggattcatgtaactatgtgagagaaatcaagcacataaatatttaagttctttgtcaagaattttttaatgttttaaaaatgtataagttaaattgtaatttttatccttctaatttcataattttgcgattttgatccttttcttcagaattttggtttacctacacaattttgcttattttacaattatattttggttattaaccaataatagtaatcaatagagtaattaaattaattatatattaattaaaattcattaattattaaaatatcaaagattattaaaccttaacctctttccctcaattatatattactcccattattttttaaaaattaatttctatttgagcatttcccccttcaacacttagaattccgaactatatgtgttagcacaattgatttttttttttttctaaaatctatctgtgtggatatttccatttcatgtattgaaaaattgaaagagtaataaaagtgcacaaaacatgagttgaatcaaatcactgttttttctagcctaaagattatcgactatttttccagtgaaatagaggttcaaaactccatatagcatgaattgaatcaattcgttattcctggctttttttttttttttttgtgaaaagctgtaaagtttttaaatggttagtttttttatctgcaataattcatatattaaaagaaaaggcttgtacgggaaatgctacaagaaaagaaccataacgtaaagaagccaatagtcataaaggcatagttctcctttacctgagagacatccaagacctagttgtgaatatcaacagcaaagaataaaaatcatcttcccctaataaacaacactgaatcttttcctatacaatcatgtgtgtgattgtataagggaatatacgattctagagaacaaaatcagcaccaactagtgacactctcaactatgacaatatctattgcaattaactgtaagaacgttaacatttataattgtatgaagtagctccttggactcactcgccattgtttgtaggagtactcaaaattattttcaaatgccctaagtcatgtccataatgtgaacaaaaagtttgccacattctttctttatccatttgttttccttcaaacacaatactattcctacatctccaaatagtccacacaattgcagcccaagcaacatcccacctccccttagtttggtatccctacaagctgtgaccattatgccaaaaatgagcccgaacacactgtggtagtgttgagttgatttggaataaattataccattttctccaaatgtcatgaaccatattacatgtgaaaaattagtgttgtaagacaatgcacatgtagcatattgatcttcaatttggatattcttttttatgagattaaccttggtaggtaatcctatcataaaacaatctccaaatgaaaaaaaatcaccttttatgatattttaattttttaaaaatgcttaataagtaaagtcatacttagacctcaaatttgcaaaaccaagacgagaaagaattgaaagctttcaagagacaatatgtagcactacgccaatttacaaattttcgagagtaattattattatgttttgtttatttgattttggttagataattgcaaaagattaatatgtttcggatttttattttcattttccattaaatactttaatttattattatataattacacgttattttttgtttttcgtactttaaagtttcatagtaaaaatgagaatggagtgtgattgatacgggtagtagttacctgctgcccaccatgtgaacaattatgaatctcgtgcccatcctgttatccacgcgggtatccttgaagcggatatccgccaatttttaaatattgtaattaaacgtacagattattatcaaacaaaagataggaaaaaaaatatcttgtaacacgggtaattattccatactgttctattcacggtaaccctcatcacacatcatacctatcttcaatcgctattaacgaatcgaacggtcctcaggaagcagatcgaagccgcgccaagaaagatggcgccgatgtaataaacaaaacagatcacaaaaagcgcttccttctactttatttcaaaaagagcgtggtcccgcagcacctagcgtaacccacgctcccacatttcattcaattcaagttctgaattccaaatccaacgctctcgcgggaaaatttcgaaactgcacacatttgcgagggaaccctcattattcagccggcaaaaaaataaaaaaactttcacataccccaacccaaccaacccctcagcacacaaacactctatttatactctcgcgcctgccccaaaactgttcgacgaaattctccactgagagatacagaaaaccgagaaaaagaaaaaaagacaatatgtatgtggtgaagcgagatgggaggcaagagacggtgcattttgataaaatcaccgcgcgtctcaagaaacttagttacggtttaagccccgaacactgtgaccctgttctggtgtctcagaaagtgtgcgctggcgtctacaaaggcgtcaccactagccagctcgatgagttggcggcggaaaccgccgcggctatgaccaccaaccatcctgactatgcttctgtgagattcttctcttctcttgcgctttttttttgtggttcctattatggcttaaaggctgatctgtgtggttttgtgtttggtgcagttggctgcgaggattgccgtttcgaatctgcacaagaatacgaagaagtcattttctgaaacgtaagtgtgatggagaactgtctctgcgttttgttgttatgaattgttctttaccgtgggtgaattgtgactgtttcaggattaaggttatgtattaccattttaatgagaaatctgcaatgaaggctcccctgattgctgatgacgtctatgaaattatcatcaaggtatttgttgctgtttgaaatttggtttgtgtgttgtttatgttctattggattacccacttaattgtggttttcatttgtgaatgtttcttatgtgtgatggatctggtgtcgtataggtttgactatctgattgcagttgatttatgtttcaaaattggaagatataggcctttgagtggttttagtatagttactgattattgactgttatactctgtgtgtgtggtgtaattctatgcttttaagttttgtttggctgttgttctagtatgatgtaattcacttttgtattgttttctattttgttgtagaatgctgctcgattggacagtgagataatctatgatagggactttgactacgattactttggtttcaaaacccttgagaggtcatacctcttgaaggttcaaggaaaggttgtggaaaggcctcagcacatgttgatgagggttgctgttggaattcataaggatgacattgattctgctgtcagaacttaccacatgatgtctcagagatggttcactcatgcatctccgacacttttcaatgcaggaacacctaggcctcaggtatagtttctgttaatgctccttccctccatgtctcccttttttgtgagcatgtggtgtgccttttgtccttattgtgtaagattactatggtgaccttatgtagttggatatgtttatgtgcattggcagttgagtagttgcttccttgtgtgcatgaaagatgatagtatagagggaatatatgacacattgaaggagtgtgcagtcattagcaaatcagcaggtggaattggtgttagtgttcacaacattcgtgccacaggcagttacatccgtggcacaaatgggacatcaaatggtattgttccaatgctgcgtgtgttcaatgatactgctcgctatgttgatcaagggggaggcaagaggaaaggtaaataatcattacactgtgttgataatttctacattgtaattttcatgaatatttataaattgtcttacattttttgtgtttcttgtaggtgcatttgctgtgtacctggagccatggcatgctgatatatttgaatttttggatttaaggaaaaaccatggaacggtatgattgatgagcctttaaaaaagtagcaattttggttcccattatttggttttgaccctagttttatttcatgctagttgaagaatggttctattttattgatatagccacatgttatttattcaggaagagcatcgtgctcgagatttgttttatgctctttgggtgtctgatctctttatggaaagagttcagagcaatgggcaatggtctttgttttgccccaatgaagcgccaggtttggctgattgctggggtgaagaatttgagaaattgtacactcattatgaaagagaagtaagtttgctctatgtatgttggccctttttaatgttttgcatgttttgaatattccttttgcttattattgccttgtttttctaaccaaattcatgtatacatagggaaaagcaaagaaggttgttcaggcacagaatctctggtttgaaattttggagtcccagatagaaactggaactccttacatgctttttaaggtggtttacaaatgcatgcttaacttttgctaggtttctatttcagtgcattttgtacttatttttcattgaaacctcttgctttttctatatcctaggacacttgcaataagaaaagcaaccaacagaatttgggcaccatcaagtcatcaaacttgtgcactgagataattgagtacacaagtccaacagaaacggctgtgtgcaacttggcatcaattgccctgccgcgatatgtaagagagaaggtaggacatccctggcatacttcatgtgttaggatcacatatgtttggtttcttggtagctatagatcaacttgttattcctgatttaggatgtttatctacttgcatagggtgtgcctatggaatctcatccatctaagcttgttggaagcagaggctcaaaaaaccgatattttgactttgacaaactgggagaggtacaatttctagttattcttgaactaaacactatactggttgttctttatgtgtttcaatatgtattgacattatcattatatgactgataattataggttactgcattggtgacaacaaacctcaataaaataattgatgttaattactacccagttgataccgctaaaagatcaaacatgcgacaccgacccattggtattggagttcagggtcttgctgataccttcatactactaggcatggcatttgattcaccagaggtaaataacatttgtgggactgctttttcatctacaatttaagctagatgttcatcaatttgatagtttacctggacatggggtgcaggctcagcagttgaacaaggatgtatttgagactatatactatcatgcactaaaaacttcatctgaattggctgcaaaagaaggtccctatgaaacatatagtggtagtcctataagcaaggtatattcttgttaaaggcttttatacttgtgcctttttaagtgtcctgagctatatttataatgcactggaaacgcacgtgtatattcaacttaattttttaggcttatgattagaaatgtaaacatccacgatgtttgtatgtagtggcttaggtgatttttgtattgtgcagggaattcttcagccagacatgtggggtgtgatgccctcaagtcgttgggattgggatgcacttcgggagatgatatcaacgacgggtgtgagaaactcacttcttgttgcccctatgccaactgcatcaactagccagattcttggcaataatgagtgttttgagccatatacttctaatatctacaaccgcagagttctaaggtttattgccataccatcttattaattattatagtttgatatcttattgatctatcttgcttgttaactgtttgtctttcagtggtgaatttgttgtagtgaacaagcatttacttcatgacttgactgaaatgggactttggtctcctacgatcaagaataatattatctatgagaatggttcagttcagaaaatcccagaaataccccatgacctgaaaatcatatacaagtatgagatttgtcattttgttacttacccaaacttggctctaagatgtttatgctaaactcagtttgaaattttcaggactgtttgggagattaagcaaaagacattggttgatatggctgttgatagaggatgctacatagaccagagtcagagcttgaatattcacatggatcaacccaactttggaaagttgacttctttgcatttctatgcgtggtcaaaggtatatagaccttcttccttgggtctaattaatatcatttttcattggattgtatccatgttgtctctaataaaggattttgtatgtttggtagtatgtactttgatgttaaatttaagtttgctttcacagttgcatcttttagtgataatgaatttcagcggaacattgaaaaatagataaatctatacactgcctacagctgtgtttatttcttctgcattgccttttatttctagatacactactaggtggacttcacattattagaaactaggtctcttatttgggaaatttcagaccaactttttgctgattgatgtttattgctttttgttttggcatgaaagggtttgaagactgggatgtattatctgcgatcacatgctgcagctgatgctatcaagtttactgttgatacctctatgctccatgtaataagaattcattgtcatcaatcttccttattcatgtaattacacattttgatattatgtttctattgagagtgcaggaaaaacctaaggcagaggaagaggatgataataccaagatggcacagatggtgtgctctttaacaaaccgagaagagtgcttggcttgtggaagttgaaagcattccaagttgcattttcccggattgattttgggcctaaaaacccttaagtgcaagcctcaaaattttgttttaggcattaatgatatgtttcaactcatacatgacaatcttaagcattctaaattatctttagagctttgtatagtacttaatggtgttaatttcatttgtacctgtttatgtattatatgttaaatagttgaaagatgtcatattggtagcctgtcaagtgtccagtgagattctttatttcctacatttaaatgttaaaattttcatccagtatgttaattatgttatggactaaaaaaaatatactacatttattaaaatagttaacatctcattaaaattttagagaccaaaatgggatgaaatattttggaaggatcaattatttagttttttttatttatttatcaattttaacttttttttatcgtaattaaaatcaataactcaataaaaaggataaaattataacaaaaaagagataaaaaggctaaaaagctaaaatgaatgaggcaattaaactgaaaaaagtatataaatcaatatttattttacctatttaatttgatatattatgagtatcataaatttctctctagaagaatttgataaatcatatattattaaatttttgcgatttgattgaccaatataatattttaagaaatttcaaaccttaatacattgaaattaaatacttataatataagtatttaaaactaatatagtaaaccattcaaaatatatgttttattttactttttaaatgctaagaggatttaagtttgagttagttagcaattatttgtaaataggaatgttaaaaaatagagcttgagtttgtaaaggaaagggcatgaatgatgttccgcctcaagttaaaatttgacacctgtcaatattttaaaatttattttctttttcaaacgtaccctttctacagcatcagcacgccgatgcctcttcatttcacattgcctgaagaatgaagaagtcgttgacaacacacattctccgaggcgctacttcgcccatttattcaccgtctccggcatctccactacattgcttacggtaccgtgaactacaccatgctcgtgaccgcgtcgccgctcgcatcgtacgtccagttctaatagatgattttggaaaacattgtgatacgcgaagggctcaggacccacgtcactgcgagcttcgcgacgggattcgtggcggcgaacccgatggacatgatcaagacgagggtaacatggcactttataaggggtttccgattgagttatgctaactcaaaatcgtccccagatgttcttgtaccaaaattggtttttgacttttgggtaaataaatggtcgtaagttgtaaccttttttgagttcggtgaagataaaaatggtcaaagtttagatcttttctacttgagagtggtgatgagtagggaactgaaagcatgaattgtagtattttttttacatagatctaaataaatggaatttctaccagaaaaatgtgactctttgtggagcttctagcaggttcaacaatggttctgtttaatattttcttacaataaacccagttcaacaatggcaaacaagtgcagcgtttgtgttgtgagatactgagatctgcatctaagcacgatgacatgattgttgagcaatgttccgcaaaagaagagtacaaagagggtaaatttagaaaaacaatgaaactttaacgaggaggtcgacgatgttcaaaataaaaagtatatacatttttcgaaatgaaaaacatacgcgtgctcttgtctagtccaggcaacagcaactgtcctatgtccagaagaggtcgagatgatgtcacacgcttccttaaaattattaaaaggagaaaaaaaaaacaatgaaaatgatgagaaaacacgttctccgttccagatcgaacaacactgaatactcacctttgggcgaggctgaacgcgccggcaacattggaacatcaaaataaaccgatcatacccattttcacaactatgctccatagtccataaaacacctgaactttttttttttcaacgttccaagagtctaagaatccaattcacatttttattcttttttcttttcttatcacgcaagtgttctgtaaattttttttcttatgttaaatatataattaattataaaagttatcaataatataatattacaattcattttaaagaagttgttattttttaactactttaaaaaaaggttataactaaatacaacctaaactaagtgaaaatttataatctagataaacttatattaaaaaaatttcaacaaaattgtattttttcacaacaacttatatattaatatacttttatgtaaaatattttatatgcgtatgataccttttatactataatttaaatatttgtaaatttcagatagacattaatatgctttgacataaaatatttatttttgtgtgacacatttttctctatgttatttttatgatttccatattaatgagttttcatgtaattttttttacataatgtaagtattttatctaagtcttaatatatttgcatgtaataaatttaactccaatatagaatatatttaattcttatgatttgtatattaacaactttcttacatagtttctatcttcatgaaatacagatatttatcatattattgcattttgatcctgtattcttttggtaaataccacatgtatcttttaggaaaataattatttagtttagttcatttcaaatttaatattacatctaatttaaacttcatattatttttatatttgatttaaatgacttataaaaccctttttggtgaatacactttttacataaaaaccaaaccaaattaaaattaaattaattgtaattgagagaggcccccattttaaggtgaaaaaaggaaaaagataaagaaagactagaaaaataatggagacacaatgtgatatgtaatatgacgataaatgaaaagagatagaagaaaaagagtgagtgaaattgagttgtaaaataatggaataacctatatttataatcactagtatattaagcaacacttttagcacggagttgaaaaactagaacactacttaaaataataatttaagaaacagtgcaaattactaaagtaaatttcacttaaactttttaagtaataaaatgaacttgcaattaaccgaaaaatattctcaaacatcttttgtcaactgtaacatcttttactcttatttcagtgtcgtgttgtttctttcacaaattgataactaataccgcgtatcgtttcacaacacgacaattgatagtgtttgatagcacaactcaacggcttcttgcatgggataccccaaatgggtatgcacggtgcgaacaccacagtttctgaatggactctatcgtgtgtgtgtaaattataccgttagatcttaagatacatgtggaatttccgtagaactatcacactagattttttctctctctctctcttactttttaccacttctttttttctccctctgtctccaccacccttcatcttcctcaaaagagacccacgacagaaagttttgtgcgcgacccaacgtcgtcgtcatcatcacacgccacaaatcaaacccacaaatcaaaccatcataactatcacaattaaacatcctaaacatcatctttaatctaaattaattaaaatcaataataaataaatttaacataaattataaaaaataaaaaaaagaaaaatgagaaaaaaaggaaaataaaataaaaaaagaaaaataactctatctatatttatatatatatatatatatatacatgttccaaatcagaataaagaaaaagaactaatgtcagatgttatgttacaaattaattataaaaaatcaactatttttatacgataaactatcacaagttactcagatcaaaatgggaaaccagatctaattatgccatggacagaatgaagttttatttttaaaaataaaataaagaataaaagagaataaaaaacacaagctccatgctctttgtggtggtggtgcggtgtagtactgtagttgactcttgactgttagtgggatggagagagaaggaaacagaaaagtaataaaaaaacaaaaaagattctatcactggtatcccattgatagtctctcagttattttaaccattaaatataaaatatactcatctaacgattctaattaatttcgcaccgtgctcgcacgatgcataccatataaggggtacgcacctcataccgcgttatgttatgtgtttgtcgtttgacctaagcaagcgttgacagaaaacttttgttgcctaatctagcttcttctattctagattggaatagtccaacactgagtcaaattgaacaataaatacaattataataccacttttaaaatactatctattagcactattcaaattccacaccaagtcggcaaaattataatagcatattattatttaattatttcttaatccttttcccctttcattatactttttaggaaccgaggctgtagcattttttcttcaatacaatatttttattatgaattaaaatcattcaaaattcattgaataatagatctatttagttggaaatcccatacatttttgtctgtgtaaaaattcttcagaccaataataactataatactatgaacaaaattagtatttgattatctgactcagtggactaaaatacccatggtgaggccaaaaaatccattgaataagatgagttttcattttatatccataatcaattttatatgaattttaatttaataataacacaaaaaagatttttccttgctcaatcatcacctaattgtatcttaacattatgttgaatattctactaatttaggatacagttactaacaacaatcatgttttctccaaattattaatgtaaatgcattcttaagaatttgaattttaaattctgacaaattaaaataatatttattttgttattcatgttgatcctattcgattcaaatgattcgaatagaattacatttagtaagaaagaagacttgtgcattagacaaataacaaaaatagtatttagacactaatttacacatttagtctctaaaaagttgtatgagactgtgttgttagttgttacttgttagagctacttgaaaaagctttctgactgataagaaaatagctacttgagaaaagaaaaaagaaagaaaaaaaaacttcgaagtctctgaaaatatagcagattttaaaaacttcgtttgatttacagcctggattattgtctgttgctaggttttttatttttgtatacctctacaaaaatataacgggttttttaatctctgtaagttatattaggtgagccaaaaaaaatctattgtgattttttaatctctacaagcaatataacggtcatgtaaataggttctccttttttgatacatgtaaataggttctctggttctggttgcaatatttatagaggtaaaaaaacggaatatataaaaattaaaagcaaaagccactattttacaaataacataaattaacggatgtataactatatattaaacttaaataatgcaatttacaaagaatacttaaataataagttttaaaaaatatttggcaagttaatgttccaataacattaaaggatagaaaatcattcttaaagactgagtgggtcctggtccctcaccttctccggatttggataaaacgtacggcattttttagcgttccgcaaagtcaatagacgagtttgatttgatttgagtttcatttaaatgtatttttttatcaataaatattaattatgaatttttattaaaaagaaaaatcaaacctgcgagttttcattttattctcctgtttattaactatttgtccaaccttacatctctatttccttttcgttttcctcttctggatttacttaaccaaaagcttttttctaattaatggatgtgtgtttgttatagaaacacgtttaataataaaagagcatcaataaattaatcaaaaaattgaacccacaaaactcgcggatgcaacttgccaatttgatataacaaggacgagaaaaggcacaactttagcgtaagcaacttgcagattcatctcatccttactgaaccaaattgggtggcaaatacagtaaagtataatggctccaatttagatactatagaaaataacgccacttgacgtaattatccatgtgccatttgcgtttcaagtcggctaattaatttaattaatctcataatatttaattgcacaagtatattttattcgagttcattttgaataagatagaattatttggagtgataaaactcatttttcaatcatttaacacaaccacatatttatgattataagttgagctgaaataatctcacactaaattcatatattttgtgttaggaaatctcacgtaatttatcttaatttttgaagtatagtttatatattatcagttgtctattgaacaatttcactttaatgtcaactgattttaaaataacatttaacattccatgatattaaactcgtagttttcagtttggcacaaccataaaaatcttaaatcggatatgataaaattctccatataaacatttaatgtaactagatactcatctcttgttaagcttgtaattaaatatacaattaagatagatcgcatatataaaataaaataatcattgtaattttatgtcggcctttcagtgttgcaacctttttctcagcaccgacctactgtgaaccgtcaagtatgttcactccacacaaacacaaccctagtttcagctttcacacctaaatcctttgacccatcatcactattaatctaaaagctccatgttttgtttgcaatttgcttcgtcaacttgttggtatcacatagctttgtgaaacattaagttacagcagggcatattgcagttcaaaacttgtcctactttttattatcactgttgcatttatttcagatatttagtatttgcctacaagtttgttttttagtttaaacaccgacgagacgactcttcatggtggctataaccaatttgaacttttcttcccttgtctgaaaaaaggttttgtgtgcgtgcgtgtgtgcgtgttggagttggctttttgaaggacgtgcatggtgaagttatatgtgtatgtgaaagatgaagaacgatagagatagagaaaagggtaacgaggttgaccagagttacagactgcatcaatcgttgtcaatgccaacgatgttttctggtctgaacagagagaaggagatgtcagccatgatatctgctttgacccatgtagtttgtggagaagatgagcatcatggtgctgattactctcttcttcatcacaatattgataatactaatagtgcagttgttgctgatgatgattttattgtaacatcaaatatggcttctggttctatgccaccttcttctacttgttcatctcaaggtagcaactctgttctcaagagaagacgggaagatgataatacaagtgatttctcacgtggaggttcattgcctgctatttcaacaagtaagaatcaaattcaataatcatactctaaattctaaaatgacaaaatctatttttttttttttaattttttggtctaagatatgttgatgggtccgggcatgtttaaagagtatgaaaaaaatttattttaatatgcttttctactacgaagtcataaaaaaaaaaaaaaaaaaacaagaattgaaggttaggtaggatcccacaaaatacccacatcttaataaaatatttatataaacatgtttataatgattgaagtttccggcagcggagacacatagtagcacacagcataacatgttacatcatagaaaagtggaaacaaccacctttttttgttttttgacacttttgtttttcttaatgttggattggattagttgcggaaagtttaagcacggtaacaagaagaacggcgaatacagtatacgattacgaatacagaacagagaaggtgaaagtagtggaggaagaaccgaggagaaaatacagaggagtgagacagaggccatggggaaaatgggctgcggaaataagagaccctttcaaagctactagggtgtggttaggaacatttgaaaccgctgaggacgcagccagagcgtacgatcaagcttcgttgcgtttcagaggcaacaaagccaaactcaacttccctgaaaacgttagtctcagacaacaacaacaacctccgttgaacttgaacccagcaccacctaatcatggggctattttgtcaattccttcgaccactgtgcacactgaggctcttcagggttcacgtggttcaagcaatttttatgagcattcttattcgcatcttcatgagtttcccgtgagtctctacgatcagattgcagtgtcaacatctactactatggcttctcatcatcttcaatttttgccgtcggcttcttcttcaactatgactatgacatctccgcaggcaccaccttcgatttatcctacgcatctaccggcatggtcttctggttgtagttataatagctcttcttctccttcggggtgatgtaaattgcattatatttcaaaagtctctcttttatgccccttgtattgtatcattgttactctcctctgttttttgcatttgcaccacgaccatttccatccaggagtggttttttgtgaccatgttattatgatcacgcaaaacaaataattcacagtttagtatctgtgtataatagagttttatttatccttccttcacgtttctccctccattaaataaatcttatatctccttctaacagttttaccactttagtatttgtgtgtagtagagttttatttatcctccatttgagacaattataatcgagtagaataaagatgattatggatcacaaaaatttctcttccaatggttaacatgtatattagagtttaagacttaatttagataaatttgtttttataaaattaattttgactaggagtaaatttgactgaataaattaatgtttgaaaatatattcatttgaaaagtaatggacataattaatgttatttgaatagcgttagtaaaattcactttggaaaaggatataatgaaaatgatgaggcataatatatctcacgagggtctgactttccttaacgcgttgcgagccgccttataacaaacaaaatattgagccacagtctgaaaaagtaataggcttaggttgaccatcatgttgttgccaagaacttgacggcatgtttttgaatgaaaggaaaggaaatatgaaagagagtaattagataattatatattttttattatttgattggagagaagaagttggagaaaaatgttgacttatagaaacaaatttatttatttttttcttattttcttctcaattcaaattttaaaattttctctccacttctattttctttccttcaacccaaactgaggataagttcaaaataaataaaaaatacatacacaacaaagaaaaaccaaatttgcaagtttttataaaagaagtaaaggaacatatactatgtttggatgagtcttatcttcgattactcgatatttttttatagaaaaaagaaagacacaagttatagatcccacaaaatgtatctttttctctcctataaaaaatatccaataaataaagaagatctttattcatcttgtttagatatttggttagtaagtttgacatacttttatctcactaaactcaatttgtcattatatttggttgcctctaaaaatactttttatacctatgtttgacactaagctgaatttaccttggaaacaacatatgaattgcttttaaaaatttatttttgttgttgaaagtatttatccaacagtaacatttaataaaaataattttaattagtactacttttatcagtataaatcacatcataataaacactccttttcatcaaactcgagttaccatcatatttaattcaaacttatatttacaaactttaatctaaatagtcagtatttttatttacactttaataacaaaacagtcaaagtttaatttgttttttatttttaaagttctgcataagaaacagaaaaaaaacaaaaaaaattatttttatgtacaaatatttaaaaataagaaacattgaaaacaaatactccatctagtcttaaatataaaaaagaaaaaaaagcatcttttttttaatctcaaatagaagaaaatttaaattaattttacctcatataattctattatttataattgaaaaccttagttagcatgacatattttttttcttatatatttaagactggaaggaataacagttttataacttaaaaatataaacaaaatgaaaaaaaaaaatagatatcacaagtaaacgcccttagatccgcaagtttctagaaaagaagcaactgacatactctggagtgaagttctataaaagcctttctatttaattatgacttccgtctgaacaaagcaatttcaatgtttgactttgaagtatctttcaagcgaggcattgaggcaaactcaccagatgttcagaaaaatttatatcagtgacgtgcgaaacaccagagaaatatagctttgtacgcaacttctggtagttgtgcaataaatttgctactcaggaccgtcaatcaaaaagactagaatgtctccataataatttgataattacgtttaccttaaggattatctcattttgatctttgcaaataaactttagagatatcttttacataaaattatttacattagattttatttcaataaccatctttatccccactgatatttgcatagtcttcaaccactaaaatggatgcattatggtacatgaaggccacaataacaatcgtttatcaaaatacagacatacttggccgaaaagattaaggttacgtctccaaatattttggaaaaaaacatctcagttcagttatacttctttaggtgattgatgagttcattagggaaaataataagatgtctataggaattaaggggggattagaaacttgtataatatccattttaagaaattctcaaataaggcgaaagttcactttaagtgaaccccaaatcattgacgtagccttcggcaacctcacatcattgcactcaaataaatagatgctttgcttgcagctagcaaattgtcattcagggaaaataacgacgtccaaatttcacaaaaaaatgtaatagaggaagaaaaaaaagatacgagaggaaaaacatcaaccaggcaaaagaatataaatgagcgaacactcaatttctagctactgctccaatcaagatcttttaggatcctgtcataagtcagtggtaaggtatgtaccagtggtatacaacaatgctactttcggtactaagatgcatatatccagctctaccctgaacgcatgagtgacagaatattaaaaagaaaaagcgataatcgtttagcgaaattcctcaccaactcagtcagtgacggttcaaaagaacattcctgaaaaggtaacttgggtacaaaatcacatcaatattgagatgcccctgcaattaccagaaacaagcattatgacaaatacttgagatgagaacaccaacagtcacgattctaccattttccataaaccagacttcccttcccgtgtccccaacgccctcttaaaacaacagaaataagaaaaatgtgagaggggcagcagagggaaaagggacaaaaactttacctgtgacagtatacgaaccttcttaaaccttcaaagcagctttatggaccatggtttccttatgtatttgatgacaactcttctccacaagatcaagcaatttctccaagtttgctgcccatgagttaagaatatcattgctatcctttgctgtttggaaacagactattcccattggcctatcaatctttgccaccagcgccttagacacaaccatatctgagagatgcttctcagcatcctgaattttatacaagtattaattaggataatcaaacaaagaaataacattttaagaaaatgaaataaattccgttgcaacatccatattcacatgcagctcaacaataaacaaaataaaccacttgaagtggtaagtgaactccagcagcaaaccagcataaaaagaccctgccaacccccaagatcatatattttctttgtaacactagtatccactggcagactaggtgtgctcacgcaccacttaaaaaatattacctcggtaacacttaagagacttaaaagcagacaaccacaaccagaataaatcacaaacctgtatactgaggcacaaaagctctgcaagtctcttcaatgtaattcttgcatagtattttgatacaacaagaatattctgaaaggtaacaaaaatgttccatattaatgttcacaaaaagaagtataaaacataaagcatatcatacaatacaataccaaccaacaaaattgatgggtgagaagaaatataatggcatcagttatttacgtgttcaattattctttgcctcagatcttctgctgctttttcacccaaagatttcccagaggccttctcattctcaaaatcactcttatatgtatcccatagagttgtccattggataacctccatggtaaccagctgtttcaaaagtagcctaggcacaacatgtaacaggtacaccaaatgacaaggaaccctaagaaaatgaacgtgagttggaaaacatgagataaaaggtaggataacatacttgaagtttggaatctcagagagattcttatcctccaaggtggaattgagaaggcttgactgcatcggatcgtagggcgctagaaccaagtaccaacatattttccttaggatctacatgtaaaagataatattcagaaaaacacaatatcacataacacagaatctcacaataacagaaaaaaagagaaggcttactggaatccacttggcagggtcttctttgacagatggaatctcatatattgccttgtagcatcggcaaatttcaagataatcattgttatgggaataataccttgaaacataaacagaaagcagcataagactacaaagattttaaaatcagtagcataaaataagtagttgaaaaatatgtagcatgaaggtacaaaaaacaaacactcatctacatcacttcatatcactgaagtctgaaagtgatatagaagcattgcaccaaatttggaaagctgtgggcaatttgctggtacaatctaataaactatgacaatttccatacactttattattgtcaaattttataagtcgttcctcaaacacacaattgatatataaagcactgaacatatcacacacaataactctgcctggggtatcatagccggtcccaagcccaggtaaacaaggaaggttgtgttaagccagtggcagtcaaggaaaaagttgttttagtgctttcctcatgcatgttttaattaggctagggaaaaagtttattttaataattgattataactacgatcaattattctaataatcatttacataaacaagtttaatgtttggatatgtttgtatttgaaataatcaaataatataggaaaacaaaagtagcaattaaaattttggcaatctgcaagtctatcgaattataaattcattgcaaattaatacccatgtaaagtcatgtgctttacctccactctctttcatttatactttgatatttagtaataaggctgatttaacccttcaacaaattatttttctttccaaaccatcaaacagagaataaaatataaatacttgacaatagtagagaaggccatgtacttcaatctgcattatatcttttagtcttgctaattggtgccctcagggggcactagttaaggaattgaaaggggaaatgttttattggaaatcatatgggagtgtatttaaaactcataagggagcacatttttccgcatctcaataaaagcatttctccctttactcccttaaccagtgcccttgtttcctcttttaataccattgaaacaaatcaacaagaatggccaacaaaatttatttccattgatatagttaaaaaggacaacacaaagctttactaatatacacccaaatgtatttaagcaaaccagaacaaatgcaagcaagagagattaacagagagtgaacacattgcaggaagacagtcattggaaatgtgccttgttcttgggcatctcaaatgcacaaattggaatgactagcaacgtttagagaagcccaaagccagaataattttcaccatttacttgacattgacttatctcaaataaaatggaaagagatactaaatatacaaggttaaggcacaatatttgcaactatatcatgatagaacaagaagggaaaaaaagcaacatgaactacatattcaattaccgaatcattagttcgtaatatatctgcttcaactccagcaaagatggtatatctgcaggggcctcttctacaacattatcaccttctttaggctttttcttttccttagataaatcggcatcaaatactcttgggctaatctttcttgagagtatttgtgcacgaacataatcctggcggtctagacataaacgaacctacacaatttgacatggaagattctgaaatcagcaactgaattgcaacacaagaaattaatggcctgctattgctgtcatcacagtaacacaaaaatattccatacttgttcgagaataaatgcaattttctcagtcttggccatggcaccaaaagtttccacctgttaagattacccattccataagtaaactgaatactaattaaagtatagaagccaacaaaacatgtgacacattcacactgaccgcaatttcttgcatcaaatcagcagcttcagctataagcccttgttcttccttaatctttgcaagtttcttgatcaatctagctctctcaatttccacgtatatctaataaatgatataaacatataaatcatatataatcacataatggaaaactataaaacaaacaaaaagttcaaacataggacacccaccttccctgcagacacactattcaatgttttgatgagttctatgcgagtttcgatatctggtgtctcatcaatatattgcatagcttgttgcaccatagctgttacagcctgcaaacatataataagctcattaataacagacaacagcaccttgtgcccttttacagaaacaattagataacatctgaactaaactcctatcgataaaggagatctacaagtgtcttttacatatctcttatcaattgcagaacacagaaaatggcagaaagccaataatctgctatatcatcatatagtggataactttgtgggcaaataatggataaaagttggcataatactaacttagatagcctactcgcacatgcccgcaaccatggcacccatagtggccgcagtagcagacagagtcgtgatagctgatctgaggatctccgcaatgcaatggcacaattgcgccgctatagcggctatttagcaacactaacttagatagcctactcgcacggaactctacgtggtagagaatcaacattctcacggccctaacatgctaattttgctgtctaagcaaaaattgagtcaaataataaactgttttccattctaaatgaacaaacaagtacggctacaattttttcaaagagaactaaaaccctaaacctcctcacgcaaaactccacagagcacttcacgcaaccacacatgaaattaaaatagaaaataataataatcgtaacgcagggagtacctgtttgagctggccacgtcgttttgacagaacgacaatctggtcattgagggttttccaggctcgtgcatcgaagcagagctgcaaaatatcggtagccgcctttctggtacctgccacgtcaccggcgagcctcatctgcttctccacgttcagcaattgctctatcgccacgtctaaattccccgtattcgcctacaaataaaaaatacacaggaaccgtcagttacagtgaccacaatcatcaaaattcagttcaggaaaaaaaaaaaaaacaaccctagagtcgttgaagggaaaaagaaaaaagaaaaaagcaactactagtagaaaaaattgacggtggaagtgagtagataaaagtaaaaaagagagatctgtaatgggttcgatccatcgatgaattgagtaaaactgaaaggggtaaggagagtgaagagagagggtaccatggctggattgtgggcgagagagagagatctccgaaggagtcgtgaaattattggaaattgaaagtggaaggaaggaaaggtcaaagaggtgagaagagaaggacgcagaatttcatagacactctttttatagtcctcaggcccaccaaggcccaacaacgatcttaattgcctggcccgatccgcctcttatgtttctgtaggtaagccacaaacctctgtactcacaaacacacttcaattttttcagaagaaaaatgtgtacttgacaaaatttcatatgcatttttaagaaaacaatgtgactaagttggaaataaaagaacttttgagttgagaaagttggtaggtttaaaggcaatatacctcttgttgttatggatggactaatgcttggaatgtttttttattattactgaaaggtggcaaaaacaccttacacaaaaagaaaatgacggaaagaaactctcataaaattttgttaaagcaagtgtctacacactccaagtggatcaaaaaaactaaatgtaatccctgataaagaatgtgaccaaattgcaaacaaaatagttgtttggatttgcctctcagtgaacatgagaaactctaacattccaacttctttgaatcaagttcatcctagttggagattctacattgcctagtgataaggccaaaatagtgtatataaacaggggaaactctcaccttaaattggatttgtagtgttgagttggatttataactcatattctaatatggtaacaaagtttattctaatgatttgttattgagtttattgtattactcgttttcaaatcacccacatatgtttaatcttgtaaatttacacttgagatgttcattcttcccatgtgaggtgtgtgtgttagatatctaacatcacttagtggtttttaggattgaagtaggcccataatccaagttttaaccaagatttcaaaattgatggtcaagtgatcatgattgctttttaaagcaaaagatcttgcttcaaataagttggccataattttctttcttttggtggaaacaaagttcgccataggtgaacaacaagttttttatttggatcatgaaagtaaaccatttattaacaaattgttcctttaggtaagaccaaatgttcaataataacctaaggtttggaatctttgacgagcttttacaaattaattcaatgtgtttctactaataaaaaattgtttacaatttatctaaaaaataattaatatgatgatattatgttacatatgatttagaatttttttaaaaaataaaacataaataaataaataaataatagataatttttatatatagataaataatagattctcagtaacaaatttgtggatatttatgaataaaaaaaatgaattaaaagattaatatttatagataacttttgaagaaaccaaaaaatataaacttgtctttaaccactagtaaaattggcatcagatgaaaatcatttacaagaaaaaacaatttgaaatcactgaacaaatttcgtaatcccactaacaaccatgttttttgatacatagattaaacataacttgtgttaactttacaaagactatattctatcttgttaactattttgttcttatatttatatctttattatatggtttataataacagattttttctctactcttacaatacttgactattttatattagacactacaaaattttattatatttcttttgtttatacaatttactgcttacatatatatatatatatatatatatatatatatattatatgcgtatgaaagtcagcgcacggtaccaacactagttttaaaataaaactagtactttttccgtctctctgcctccctctctgccctcacttcttcccctttaccccacgccacgctcgcgagtaagaggacttgctacttcaattcaagggttccacaaacaacaacaagccttttttttccccctctttttcatgtttaaacaatgaaaagcaagctcagacgatattattcactctgactccgagctatacaccaccgagaccgagtagtgctatcactttcatttcacttttctcctccctattcccacaagcgatccttcgcgacgcataattcccaaactcgcgcttaatcactttgagggcaaacaaaccctcgaatttgaaaaaaaatgaggtttaacgagagcgctatgaattggattggcgctacggttggtggcctcatgggcacagtgggtgcaatattggcattgaaagatgtcaaagtggcgattccatttaccttcgctgcagacaatagtagcttcgagaattcgctctttgttccgggcttgcaaaacctccaaaacaattgtttcctcaacgttgttttgcaggtaataaggcttcgctgtttgttgcttctctcctctttcttcaattgccaaatgaatattttgttatttctttgttgcaggctctagccagctgtttttgctttcagagttttcttcacagtgtgatgggagagtgcgggagtaaggacctggatgaaaacatgcctcttgcacttactttggctactttgctagaaggtagttgaagtagaaccttattgagggtctttttggacatttttttttcaataagtccggtttgtttaaactcttatttattaagaaaaagcgcttattttaataaaataaagagtcttttattttcttagtatgtttgtcttttattttctatttgtttttagaagcaaatcctgcatattaaacacacttttttaaatgggccttattttgaaactgttttttttttttttaagtttaaataaactgacccaaaataagttaaaacaaggtaaaatgaaataagcttcttccctaagttaaaattagcttatacatgagttaatttgtagatgttctcatttagcttctccagaagctgattataacttaaatgcattagctaatgtttacctcaagggagaatattaatttattttactttttttttcctataaattgctttttgaaaagttatccaaacagggcccgtgtatgtttctttgattgtgaatcattcatgttttacgtttgaaatctttgatggaatgtttctttatgtatgtgcagagctgagttctgttagtgcagaaagggttacactgagtcctcgaaagatgatgcttgcgatgtccaattacattccaaattttaatctaactagccagcaggtagaattgcgtgtgtcttatgattgatttagtggctgagttatgttttagttttgtgtcttgttcatgcttgttcttttgtttattgaaggatgcagctgaagcatttctccatctgttatgcttattgagagaagaatttggaggttgttatgctccaaagatgagttctttagcagacatttttgcttctaataatagaattcttactccaatacagagggactggcaaagtgagcaggagagatggcagcaactcttccttggaccttttgatgggattcttggcagccacttgacctgtcaaagttgttcatccctggtacatgggtcttttctcaatgccttatgatacacttttccccgttaattgcacatacacaccattgtcattgtttgcaatattagactggcttttttaaaaactatgacttaacagttatgtatctctgactgagttgcattatgtttgaaatcattctatagctggctagtggctactaggagctaggctatggtttagagacatgtttttgttgacttgatgttttattttgaagctgttgcatttggagggaaaaggagtgtagggtaacattacggtcacttggtaaaacttctaggaagaaataaatttagtaatttcaaaatggtcagcaatgaagaaaaatataggaattgaggttataggatggtatgatttgggttttagaagctaagaaaataaagtaaattttggttctgttctatgtgacttttgattttcatacatttagtgttcacatgttgataaatttaatgatggtaataatataaaggataaattttgaggtcacgttggctgactcagctcagtagttcacattctcaagctactttgacaagacttattagcaggttactggaatgactaaagccaattcaattactccaaacttgcaatctaagttattgatgatctgatagtgtactttctggctgcagatttagttgttgattacaatttagcttagcataaatatttatttttgttttttaaaataacttccctctatcattattcttaatgtaactatgataatgtccctttgtaacagtcatttattatatttttaactttatatttattcagtgcagatctcgattaactttgaacattttgattgtttgcctctttcacctgtgcttagtgataattccacaatagtaagttttaaaactaatttcactcatactgtagcttcaatgttatttcttttataatagaagtgctgcactcctcctgtagctccctgattattaaatgtgacactggcatatttcagggagttggttgtaccctggtggattgcctgaagcagttcactgttgctgaacatgttgaaaattatcactgcagccactgttggcataatgccgcaatcaagtatctttctataatggaaggaaatgaggtcatccctgtgtgaatatttcattcatttagagataaataaaggcagtttagagatgcatagttggtggttgcgaaatctggcaattattctttatgttgtccaatatgatttctgtgctttactcaggtagaactcaaaaagataaggagatgctctgacccagaaatctgcaattgccgaaaaatgtataatcttgataaactaccctggtcaaacaggttttcacatactctgaagcagctaagtattgcaaggtgcccaagggtatgcatactgtgttttctgatctgacatttatcatttcctcaactagcttttcttttgtagttcaatgtctgaactactaaaacgtgattgtctggttgcagattttatgcatccaattgaaaagagtttatatgaatgtctttggagagctagtcaaactgcaggtacttgaatctctaacgtattggatctgtctcagcttttgtcccaccccctcccaaaaggaaaagaaaagttccccagacataatgccaaactgattgttcttttaattaggatgtaaacttgactattattatagattggctgaacttgaacaaaagacggtaataattgagtagcatataaatattcattaaatttcatggtagaatttcgttctgatgatggtaatgcagggccatatttcttttccattgattttggatgtgctgtcattcatgacaactagactgggagtgaagacacaggaaatggatgtacaaagtttgccattaaatttgaagtataacagaagaaatattttcccaaatcattctgatctggaatctgagataagtacattgaaattttgtggcctttatggagcaacgagagagcagatcaattcagatggtgtcattgatgatggatttgtctcctctacaaatggacaggcactttataatgacactgtatctccctgctctggttcttcagaaagcattcactcagatacatatatgcaatcaattgaccaggttggtttaatttttttgatattgatgcatttattttgcactgaactttgaaatcccatatccttgcatcttgtgtctgtccataatatgccccctttaaagaagcttcacgtatctgtccatccataaatcttattcgtcaagtataaactagaattttctttcatctaggtaaatttctttcatgtcacagatccaaacaagatttttcaccacaagccatttgtttagattgtgctaaaatcaaactcaaaagcattctactaattaattgtgaggataatactactaatatggatgcctttgttttagattggacccttgatatatcccttgtatttctcccctgtggctatgcccaatacttgttgtgatgcttgtggaactgaaatgaattaaacggtattttttggtgggatagtcttaatcttaaaaatggaaagatgattaatgtgatattgacttcgtggtggaggtgctttcatattctcactatgttgtgctttgtgcaggtagatgtttcttgtagttcagttcctcaagaaacatgtttgtatcaacttgtttctgttgtggaacactttggaaaagctggaagtgggcattacactgtttacagatctgtaagagtggagtcttcagaagacgtctctgatgacttcctcaatcaaactccaatgcgttggttttgtatttcagattctcaagtgcatgctgtttcaggggaagatgttctttccagtgaggccagcttgcttttctatgagagaattccaaggaactgaaaaaattcctttattttgttttgggaagttctgggttcacaagatgcattggttgattgttctgaatcacaggagtctatgtttgtggcgttttaactcaccacaagtgatataaggaagtgctaaggttgtttcaaattgctaaacaaccttttggggagactaattataatgaaagaaaattaactacttggaatggatattcggttgtttttgtatactcagctaatcaattttgttcccttttgtggttacgccaatcaaataatttttaggtacaaaaagacggattatctcaatttctcaaccgctacagttgcagcagaaagcactaacttatgctaagggttattgaacgggagccatgcgtttggaatgtcgttttcagtataggagttactgagaataagttgatcatactgtccaaaggaaatttcaatgataaacaacttctgaccaattactgcataactgcatggcattaagtatatgtttgaatttcagttaagaatatcatagcaacattttctttctttattttatgtattggaattcaaaattatatattggaattcacaaaaatattttcaaaactgatattttttctgcttttgttttcattttcaagaaatccaattgaattttatttttcatttttgtcgtgttcaaccttttagttatgtcatgtcaaatcaatttaaatatatgaaagataacaaatgatctaacgaaaatattaatataaaatatattgaaatgtattcattctaatttattgtcaattagagagttcacataatattaggatggatagtttaataaatacatttacctgttatttatattaaaacaaaatattcgattttctttcttattttatgccttatgaattttacttaaaggagaatgaatattatactacaagcttcatgtgaaaacgtgtatgaaatataattctaaagtagtcaataattatattttttaccaattgtgtgttgtaattgataatattcttatacttaaaaacgactaatggtctatttacaaataaataactcttttataagaagcatgcatgcttttatatatatatatatatatatatatatatatatatatatattatgtttcattagaatagctttgtaatcacattttttgttaatttgatttttttttgaaatatttatatttttaatttaattttaccatgcaacagtgtaaaagtttaaattattattattgctttaaatcagactgatcattgaatggataatattgattcatagttcattagtttactcatagtagaattgaaaaaagttaaatataattttaatacgatacaatatattaaataataaattaatataaaaataattataagaaaaatgaattaattaaattttaaatagttgtaaaaggaatcacatttttttgagataaataaaatgttaagagaagatatctggtttaatatggggagatatatagacataatttgaataattttaaaagttcttttataactaggatgttatgctgtaggttgcaatggagtatatgtacgtatgtaaatataagtttgtataagtgtcactattctgaaatttcaatagagatctcgcagagtactgtactcatgcatattttaatttgtctcttggtatctttaatatatgctatccataccctattctttcgtgtaggaaagatatggagtgattttcttaccgtgtatcctagattattacaacgctataaaattgcgagaaattgaataatatatggaacaatttcctaagcatataaaataaattgtggtacaaaatttatccatcaattcaaattgtggatcggtggcttccttctggctggagtgtaatccattgagaacacttcgtttgcattatctttaccttcttttggcttaaatacgtgatcatgcgtttcactatgatgagctgtactagcatcactactagtgctatccatattgcttttttctttcagtattcctgctgcacgtacaaataatgataacataaaacaaattaattttatataacaaaaattaaaaagtggaataacatgagagagatctcaaatccaatatgtgactatgatgatatatgatctatatgacaaaatacaagaattaatatatacctctatcagggatagatatgaagtagaagaagaaagccacaagtagaatgcgtttgtttagcacaaccatcttaaataatttgattaattgtgctctatgacaagatatttgatgatctgaatatatacacaatatacaactccatttgtgacccataaatagacatatagatttagtttgcttgtagttgtaggaagttgccaagaagattataatttagtatggatcatggtggtagtttgtacattagagaaatggtctacgagggtcacatcattgtctgctgatgtctagattgaaaagatgggtatgtgtttttggggaaagtcttgaaagaaaaaaagtagaaatccatgacattcataactgtcaacctctacaataatatacgtgtatttgggccataccagttttctttataatatattgtcaactgcttcctgtaggacctgtacactatatcaggcctaggttcttgtcaaataactaccaataaaatatatcaattaaaccttaaggtcctttccgtagaatgaaaaaaataatatgaaaatgaattaaattaaaatagatataaaaatgtaggttctatcttatttattgtttatttacaattgaagggacccttaatatgctgtttaatttctaatatgtcaattaactcttgatatttctcatcacattcttctgtacatatatatagactcacccacaataaaaagaaatagaaatagaacaattcaacagatagtttcgactgtcgagtttcgagactaattaacctaatgccttgaagctttgaaattgaataataacacgagataataaaaagttctgccttttggtcttgggggctttgcatgaaaaaaataaaaataaaaataaaataagaaagagaaggagataattatatatagtatatagtatcatatgtaccacacgtcaatttttatgtttagtaacgaaactgatccaacaagcagcatactaaaattttccatgtacgcgtagtttaaatagtatttttagaatatcatactctagctgcagagttttgatttctcaagctcctctattttccgtatgtgtacgtacgagtccataaaattttgagttgcgttaacaaacagaataattaatggctagttgagaaagccacccacctctaaattaactaccagaatcataatacggcctcagtgattcgtatcaaattatcaatatctaacaggaatttggttgaggaaatactgtctgcatgtcatcttgatcttgcccattaaattgtgtctgagtgtacgggcaaaataattgtgaacactcaaatttatttgaatacttgtttcattatccttgaaaaaaattataaaaagcatccctattcttttatataaaattaaaaaaggattgagaggaaattattttgagctttaaccccccttgaattgagtacaattaacctcggttcaaattaatgcacacaatgtagtcctttattaacttaaggctactttcatagatctttggcttaattaagcttcctagtgaagcaacacaaagattaaaaatgtctcatcagatgtgtcatttctcaagaaacataatagagaattcatcagtttgttgcagtcacatctcattgaaactaaagagtcaaacacatcccatgatcatcaattttgcacatagatcacaatcatattagagctcctcgattcctatactgaaacctagctaatttttgcttaggaaactatatacctcaagtagaagtatatcttggacccccaactctcttcaagacatgcatgtatattatataaacaacaatataatgtccagtttatttaaatttatttattgaagtaaatatttattttaataaaataagtaatattttgtttcttaatatatttgactaaactgtttctacttaaaaaaaataatattttgcttattttaagaaataaattctatttgtttctttaaaaaaagtttattttaaaattattttttaaaaagttaaataaactcacccaatattactctccttttaaagttatatgtaaaccacctcaaaattttactaattcaatcatggaataatatgtggatgccacatcctcagttgctggaatctccaactctcccccatgagcttgcaatttgaagccacataatgaaccatctataccattatgcgagcaggagacaagtccctcaacctctgacatgctgggcaccctctatcttaggttacgatgaatgcaacaattcacgaacttgtaatccatcttcatgatgatgcgagtagctaggaaataagctttccaacctgctccttatgagcaccctctatctctacccacaatgcaacgggaatagtatcacagtagctaggcaattttattctctttattgtaattgagaactgagttgaataattcaaatttcatgttgatgttttctttttccaaattctttttttttatcatatgttttgctagacctaatatgaaggtgatctttttgaactcttatattcgatttcgtatatttcatatttttcttacaaaaaataaaagaagctaagaaattaccccaccaaattgttatttttgtattgcaacataaataaataataaaaaaatatagaatataaggtttgttttgtatgtggaaaaaggttagacgacgttgagttttggataataaattatgttagtgtgagatagttgaacatccttaattaatcttatacttttttaagtaaataatctaataaattatactttctaaaaagttctaataaattttgagtggtcttatttgattataaatttttgtcttattttatacataattaattgggcctttgctatccaaacggttcgacattcattcccaagcggaccttactcggcttagaaggtctaaaagacattttaaacaaatctttatatttttacatttagttctaaaaaaaatttaatttaggtgagatattttcttagccttgtagtttaattaggattatgggagttgtaactatttgattatccaaaatttattttaaatattttcttataattgatcgattttatgtaaaaatgattagtttaggtttggcgccttattaatcatataatttgatttgagatatttgaattgtgacaatttgagtatctagattttattgaaatgggtaatttaggcgcgttgcactaaaaatatattttttctaatttttttctttatttttgcttttaaacggggtatgctaactattttaaaaaaaatgttaatattttatgcatttaattctaacttaaaataatcaatcactttaggacgcacgtatgaagagtacttggattaaatatttatttatttattttatgcataaatccactcttaaatctagtttaatttttatagagcaatgtaacgactttctttggggtagtatgtttcgtcaaatccttattttatatatatatatatatatatacatatatatatatatatatatatcacattctatttaatattagaggagtgtttataacagtactgtactatctaacacactttaacttatattttttaataaagaactaattcatcaatatcaaaagtaattaaattaattaattataattaatattatgatcaattaatgcatttacttgtaggaacaggctacggtgtcacctaaattccttgtgttttgtggtcaagttttagatgataaacttcacaattaagaatataaaaataataattaatacatttagaaatgttgactagtctatatttttataattaggataatttactcatttgttttcttataaaggaccagatatatacaatttattaaaattgaattttgatattaacaaaacattttcctacatatataaccttatccgtcccttcgcataaacactcccaccaaccacatacattgtttttagacttcaaatataaaataaattctctaatttttttttcttcatttacatttttgtctaatacccattaacctctctgcttatcagaaaaaattagtaactttgagtaatcgttcaagttttaaaatcattatatttagactatatataagggacacaaaagtgagacatagaagaattaatattcaccattcaatcttactagtagtagacctgtcgactaggtttatgtgtttgcttctttttaactccatggagtcatcctacgtcatactcacatacacgtgcattctataatcatttttggcgtcgttaattatagattaagatcattctttaagctataaaaatttggaaaacagtctagacgttatcaatataagaaaattatattgtctccagctaaaattattatatattatatatatgtacgataaatttattcactttaatttatataaaaattactttaaaatcataacttatcgtatattttgattgattgtgagtgtaaaaaatcttttacactattagttgatagaaactaaggtctaatatttgttaaatatgaagaaacttttaagctctgtaaagttatactgtgtacaacgaagcaaatatatttgttgtaccttttctatatccaataaattttatatgatgatgacaacagacaatagaaataaattataattatgcgccatggtccatatatactccactaactattttatattattaatatttatgtcttaattcttctttatgattaacttaacaaatgtttcagtttattcagaatacactttgcacacacaaaaatacattaaattattagttcatatccaatttttacaaaatattttgacatataaggcatcataattgaattctggaatgagattactcgaaaagagaaacttcatcatgcttagattttgcatatcgatagtgctccttaaaaatattgattatgcttcataataaaagaaaatttatattatttttttctgaaattaatattatcaatcctcctaatcctcttaaagaatttaaataggtatttttattaactctttaatttttttctactaaaaaactgtttacttttttcaagaaattatttcttaactttaaaacagtatatataacttgcatgatatatagcataattaaccgaatccgttcttaatttgttttggatattgatttttatttcatgtttttatgaagtgatataattagttattaaacaaaatataaatcccttaaaaaaataatataaatcatgatataaaattgttctggtacaagcttcctcatttagggttagagtctgtttatccaaatcatttgagtgtgtaatctaatctccttttgcacctggggttttattgcaaatgatagattaaaaatcataccaatatatttgtgattgattgataaattaaaattgttttacattatcaacctatgcatcactattaaattctatattttaactaaagttttaattttatagttacaaacttaccatcactattaaattcttttggtatcatctatattttttgatgttgttttcaacataaaaatacaatataatattattctttcatttacatattatcataatttttcatcaagaaaatttaactggtattttaagaaataataatgttaaaataattttaataatataatataatcttatttaatcatactatgtatgcaatacatgaggacaaacactaattagttattgtcacctatatcatgttcacactaattattctatatgcattacatgaaaacaacctcacacatactctcacacacacacacacatatatatatatatatatatatgtattataattatcattgtgacccttgaatatgactttaaaatgagaaacgcactacatattttccatatgtaattttcattgtaggccttcttaattaacaaataaaacgttcaatctgcattattcgatagctagctagtagcaatcattcaattgtcttggtgttcaagatgttgccaggctcaatttactgtgtagtactgtactatactttgtcatacataacagttttttgtttgttccgattgtattattctcctagagttagattgcacataataggagatttgattaattaatcatggaggatggcaggattcaatgaatggagggagaatacccaacactggtgagactacgatcattttcagataagacaatgggcaatgtttttcatgtttggagaggattaagacaatggacaatgtttttcatgtttggagaggattaagacaatggacaagtgtttgcatatcatggatcacatgggaagagtccattggtcatctactaggtaggcctactctgtcctttaaatattgagcataaaccaaccctgatttggagggctatttaaaggctatgatagacacagtcttgattgagagaatgaaattataagcaaccaagttggctaaggcaaagctacatagcatatttatatgtctaaataggtagcattatatggtgggacaaaactattattagaaagtaaaaaattaaacaacttttgcaaatttgaagagactttctatcttagaatttataatctttggaattagtgtcactttttaatttcaagtttaactagtatggtcactgcaaatgcacttggtagatggggaaaaaattgagcaaaaatttataactcgtaaatctataatataaagtagtttttctaagataaaataaaatatggtagcatcttttattttatccacgttatatgtgaaattatatattaggtaaatcacttaaatataaaataggcttttttattcattttttattataggtcaacttactaacgcaaggcccaattagaaacggaaaagttgcgtcaaactagatttcatgaagtgtgagtttggtctatatttctcaaatctaagacttaagattaatcaacttattgaaaataggcctttaaattgactcgatctgataggttatttaatagtataacttttaaaatataggttaaaaaagttacccttaaatatgttaatgggcctaagcttataatcatgtaagcaagcttaaacctttaaataaatccacaaatatacaatcttaaaatgttacaatataaatttagtacaataataattatattatcatatctcaacatattattattgttggagatccttcatccacataatccaaatacaatatataagtgtgaacaatttttatttctcttaaattaatttttggagttaagttaaacttaaatttaagttttaacatagtataaaagtctattttgagttggtaggatgaggagtgtgttggtgattttacattatgatagaagattaaattaagttcaattctatattattgttgttgtttttattgttattgttattaacttaattaagtaaatagagccttgaaagattttttgaatgactcaaaactcaaatttttctcattaaattgacattaaaaatattagacttaactcatttagggatagtttttttaatcaataaatattaatttattaattttgttaaaaatataagtaaaaaagattggaaccgtgatctttctcttcaattcctttttttccttcatacccttaaatctctctttctccaccatcaaataaaccttttatatctcattttgaggataggattttcgtgacttgacttaattgtaaacctcttatgaacaacctaacttatttttccacatacacttgacataatcattactcaatcaattcaagccgattacattatttcttccaataattaactcgtaataaactgtggcttttaggatcacatatggcgatttaatctcttgaaagatagactataaccacctattggtctagtcaaattgtaactacctgacgtcctaatcctataaagaagaatttcatctcttatgcagatctagttgatgaaagaactaaatataaaagaaataagaaaagaaaaactcgaaagaagagaaaatgaagggaacaaaagtaaaaaaatgtattatttgaattaatagaaataaaaatgatttttttttagtttgttattggaaaagtgaaagaatgaataataaaaagaggctcgaatcggaccacgaaaagcatgacttatgagaaatttaggtaattaagatcattttgacagctccaactgcatgtgaatttatttttttattattattagggaaaaaatattagactatgcatgttggggatccagacagacccattaatatttactcttaattaccaatcgtaccatttattatcattactattagttgccctgcaggtaatttcttaatgaatgggttgttcttttgctccactgctgcaacatcaggtatctttggttaagtgactgattgaagaccttttattcgggaagaatactccgtatagtagcacgaaaacatggtagcctatgataacttattaataacatgtgtcaatgccatatggagtaaaaaaattattcttcttcatatacattattgaactttttgacatttaatttcttgtcttcacatgtcctactgagtaacccatttgttgtttatgatatggctgaagattgaagggccactcagttgtatatatataaagatatatatcattatttcatataccatcatgcatttcacagcttataataatatgtaaattaacttcaaatattcccagatgctgaaagtactacaagaacatatatataataatcaaacttctaactcttgtcctgatttaaattgttctccaacatggcaagctatttgattatatggatatgtgaatagtttcactatagcaactgagatgtcacagactttttttatcttctttacattaaataaacttcagtctcttaagatgtacgtaccccgccaataaagtgattgcattaattactccagcaaaaatgtgtataaggttagcatagggataagggtatgaaaattaagcttatttttttttttttattaacacatctaaaacaatattagtaagttttttgtgttggccgggtatggttcatactttgtctttagaagataagtgcgggggctcgggggagtcgcttcagtgggaatagggggcagcaccccaaaacttttttctagatttaatattgttgttggtcttatattttattatttgcatcttaggcctatgaataattacggtgtttagggtttctaagcttatatatttctttgtaatctgagtgctttctaacgagtgcgtgagaaaaatataaagaatagctggacgtaacccacattgagtgaattaggataaacactgtgcgttattttgttctttccttttctctctttttgctatctcgattgttgtgtgattattcgatatccaacattttggtgcctgcttaacacttttgaattttgaaaactcttctccgtatgctcccctcatattcttatggcttcaaaaaccatttacacgtgagttctgaatatatatgatttggcaacagatagattggtgttttcttaacaccagtcaataatttaagtgtggatttcctagcttcaaacaatatctatacaatatacacgaaggccctagatagatcaactgcagagtagttaagcagtgtggaattggttccttttctaagacaataagaaaaaaaacagatcttcaattatggatcggcggattcctttttgcaggtgtgtaatccattgtatccaactcatcattgctgtcttctgccccttcatgatttggcttaaagaaactagtttgagtactcttcttaactgcatcatccttaatctctcgcaaacttctggctgtaagatattaaccaaaagaagcatcacataaatgataacggactttgaatatcatatcatatacacaatattaatcttaattttctaacaatctataaaattgtaaacataaaactaaacttaccactagctgtcatggtgatgaagcaaagcaacagataagcaacaaggagtaagcgcctgtttggtgacatagccattattttacttaactcttggagtgtcttttggtatgaatgtgttatgtgtaactctgcacttgcacaagacatggcctagttgccctctttttatagtcatggaaatcaagtaattgccaataagagggtacaccattcacgacaaggacaaatattgttgcgatttaggttctaatcgatgtctcccgctttgtcttccttgaaagtgacaagactttgcttcgaaaacaggatctaagttaagagcaaaaatggttccattccttcaatgctaccaagttggcattttgtgtcccttaacacttgccactgtgaatgtgaattaaccaaagattatccacaaagaaaaataacccctttccttcttttgaggagggggagggaccccattcttcttttgtggaatacactacgtgcacgagacttttaagggtattgtatggttatgaaacaataaggactgaatcgagcatttggcccctatctcactagatacggtgaatttcaatattccttacatataaactgacagacatgaatgctacacatgcaattcatgaaacatctctttctttcatttaatatgtacaacgacatatgttatatatatttctattatttttgtactagtgtacaaaattagctacgaagtagtatcacagcatatattttattcataggctaacattcactggttattaatttagttctaaaatttacgagaaactaatctcaatacctcgcaaccttagggtgtatgttggttttccaatggttgccttcatccaaactccgcatgcaatagtagagtagtcacttaattataatgattatgatgttagttaaagtcaatgtgggtcaaattagtcaagaggtaagaaacaaggtaacattatagagtggtctgatacatctaaaatggcggatcatgcatttgattataaaatatcaaataataataaattagagttatcgaaattataattgtgtgtaccttgttggatcattattgaatcaaagaaaagtcgaaaaagatgagagaataaggtgtcagaattttcctctatattgcctatttagaaattgacaacattcaactatagaagcataatggttcatgggacttaattccatataaatagactagtaaagggacctatttaattacccaaaaaaaaatttatgcccactaagttcacatatcatggaaaaccaggatcacactaaagtctatactagtgtcaaattattcttaataacaatagatgctagaagtccaattcaatataatcacaatgagtcaatcaaaatattaaaatttgaatatttattaaccccaattaatttaaaatataaaattaattaattaatgttttcgaaaaatttataacatgtaccttagctagggagagtaacatttagtttgcgcatgctcctcatatttaactattctatcttcatatatattattcttcttaatcatgcctatttctaatctagttaaacaaaaaaggaaatcatgcattatgtaatgaatcaaaatagatgaccgacattgatggggcttcaatcattttcagataagccgttgaacactgttgtctgttgaaaaatcacccgatcaatatctaattgtggggctgcactgtccctttattgcccatacataaactgaatatttatctaattctcccgctgatccgtaagattagagataataccgatggaaaagaaagattaggaatatatattaataaatatatatatatatatatatatatatatatatattttagacattacaactataatagaggttgcattatctacattttcccacaatttcctgcaacgactagaatttaaaaccttcatcataactcgatgacttttaccgtacagttcgttctatgatgacagtacgtacatgccaaatagtgaactataggagtaggacgccatggaaacagtactcaatgtaagttttactagaatatagtttgcattttgtaataataataataatgtacttcaggtgatggtccagattgtaagtcacacgggtcggttgtgtcaggcacaaaatgacaatgtggaagccaaaaaaaacccaagcaaacgaagtgaaaccttgttacccctgaaaatgaactaattgagcttgagtaacaaattgttgaggttagaatcactagaacgagcgtgaccatgttccacacccgggctttagggtaggggccagtgggtcacatttcctccttctaatcgaaacgcgtggatgcatacaagaccaaaaccaaaaggccccattggagggaaaagtgagtggtcccaaacaaaccctagttttggttttggaccctctgggccgtcacgtgcttccggagcggctttcgcgtgatattgctttgctatgcttaatatcattgattagtgtgtggtttagaggattaggaaaagttaatcacgtcttgtttcggatcgatttcgattttgcctcttcaataagtgcttatttgctttcacttgtcgctgcgttgcgtattactacagagtaacgatccagggcacaaactcacatgttctgttgggagtccactcattatctactctacgtcgatgtgatatggaccaacttagcaattcacacaatttaaacacgtattctttttgtaacaattttatacacgatacaagcatataatttagttgcaatattctaaatattttatactatcttttaaattacaatttcatctaaaatggagactcttaatcataacataaactcgtaaaaggttaagttaagatcataaaagtcatgtgacttttttgagtgatcatgtaatcactaaataattttaattttaattaaccatgatttacacacatttttgtatttcaatgaggacgtcttaaaaaaaaacttttgcttattataaacaatgaaaacaattaatatggtaacaaaattatacaaatgattaaaattaataatcaatcattgattgcatgattacttaaaaaaatcatatgcatttatctcttaatattgatcatttaattatgaattcttttagtctttaccattaaaattgtcatatgcatttttcttattttgataattcaaatttgacttaatggcttatatctataggttatgttgagtaaaactagctgaaagttaaaaaaatagtttttagattataagtgttcattaaaattagttgttgaattaattaaaaaatgtaaaataccagaaaaataataaaattataatttgttaaaaaatgtaactaaaaaattagataaatatattaaagataaaaatgaaagaaaatataaaaaagtaaaaactagttgaattgtcagactcatctctcacatcaacaaaaaaaggattgggtgagccaactcatcaacttgtgatgggtttagttggattgaaattttcttatcccaccacgaagtgagtgtagttgagttgatccatataaaatttaagttcgtggtaagccaaattatgttaaaagttcgttaggattatttcttattcgtgtctattttcttttacattgacaattatttccctccctcgtcaactttgtgatgctatagtgaacaataataaacttaatacttaagttgagagaatattttagcaagataacagcttacgaaatgtaaaaacatatctttagtgagatgaaggttagacatttatatgcaagggtttttgtcactaaaggatgatggttactaaatcttaagaataggtgaaaataataaaccgttaattaaacaattaattaatctaagcaatataaattattttcccatggtgggaaatctaattagctctgccactgttgcctgtgacgttaaacaaagattttctacattctaaggcaacaacaaaaaaggaggaaaaatattggagtcgtgaaaaaaataaacacacactaaacattcataagtacatgctaatcttccttgaagcagtgttattaggtgtgtatttgtaatcaagttaaaatgtcgttacacacaaattcaacaatttgttagtcacattaacatgttttgtctgcgtctctcaacaattgacgcgccttagatgtgaatttgccaatctaccaatttacatgcatttgccaattatttgctagcttagatgtgaatttgccaatttaagtgcattttgaattaaaatccaaacacacactaaatttcttagtgttagagttcatggtaaccagatagtggaggaggaaaaaatggaaaaaaaggaaaaagtagttaatattaggataatactcaaaatgagtaaatcagttacaaatgagtaaaactttgacttatatagttaatcctatatctctaatacccccgcaagttggaatgtgttgaaaacacttccagcttggagaagattacacaattataccaaagtaaaataaagtctatcaactggaatatattagagatataggattggttatataagccaaggttttactcatttgtaactgatttactcattttgagtattatcctaatattaactactttttcctttttctccattttttctcctccactatctggttaccatgaactctaacatggtatcagagcaatctatccaccataatttttcttttctccgctgtagttcaccacaccacaccgcagagactccaatttccagttgccaccgcactggaaatggccataggtgtagtagttaccaattcaacttccacttcaatttcgaacttcgtccaaatgtggttctgattgcaagatttgtgccttcttccggtcatgaaacaagaaaccaccaccatcaatcgactcctctccatgtccacaacaaaatccctctgtttttagtctctgccgtcatgaggcgatttctggccaccgtctgccgccgtcatccgctgcaaaaatcaatttctgttcgccattgacaaaaatactctgatcttttcgcatcataacccaccgatcaagctctctgttcactgttgctatcatttttggtcgtgaggcgatttctggccaccgtgcaccgtcgtcatccaccacaacagttgtgccaccaaccttcgtcatgcgtctccgtcctttgtcatgagtggcaatttttagtcactgtttccaagcttcaatctccatattgttcttttgcttggtgagataaggctttttgcacacaacctgtttgcaaaaattcctcaatgaagacaaatacagttcttgttgttgatgttgctgccattaagttttctattatgcagcttaatgtttcattgatatttggcctattttggcttattgttttcagccttttaggcttgttttgatgattgtagcttatgccaatgtggtgtttaagcattgtttctttgtttgcttctgtcgatggtggttaagttctgttttagcttctgccatggatggttaagccttggttgcttctgtcttgagtggttaagcattgtagcttctgctcttgatggttaagctttgatgatttgagcttctgcttttgcttggtggttaagctttgatttgcctattttggcctttgatgcttgctttggactcttgatttgctggagcaagtgctatgaagatattagaagaagttcaaggatgcagattttagttgaagacttctaggatttatgcactatggctgcacctacactttgatttgtttctaaatccttgtatttggccgatgtattttcggcattttagctatattccagttgatagactttattttgctttggtataattgtgtaatcttctccaagctgaaagtgttttcaacacattccagcttgcggggggcattagagatataggattggctatataagctaaggttttactcatttgtaactgatttactcattttgagtattatcctaatattaactactttttcctttttctccattttctctcctccactatttggttaccatgaactctaacacttagaatgtgcaaaaatgagagtttactaatttggacataaatttatcaacttttatgtgtgtttttgattgaaatccagacacacactaatcctatcatcgtgagtaaaaagagagctaaaaaagaatgaaataaacagtaatataagatggtatccatttcatcctacgaaacattttaaaagcttcttagaccgtgaaaaagtgagagttcaaccgactaaacaaacacatccctagttaattagaatatgatatccaagtgaccaaacacacccaccgagaatgatcccgcgctaattcgaagacggaaaaaccaaacaccatagtagtgccgaggcggtaccgatggatcccatcaccctctccgacgaagaagacccttcaacgccgttcccgctccgtcccaagaaacgccgaaccgaaccggatccaaaccgcaccgtcttcgtcatcgatgatgacccaacccctcacaaatccgccacaccttctatcgttcccgagactccaatgtccgcgctattcgattccgacattgcaattgtcaaatgcaccataccttccgatcccaccgctagggtttccccccaaaaattctctggtcgaatccattttctgtcactgctatcacttcactttagctctatctctcgttccttattttccataatttgatttatatttttcggctggaactctagcattactcattttcagtgattgtataagtaaacataattattgcattattttgcaatctagaaaagaaaaataattggaattgcattgttagggtatttgtttgtttccgtgctgatatgtagctttgggttttctagtggaatttaatttgtcatgatttatgattgttgtttgttctcccccctttttgaaatgttcaatattctatgagaagtgaacttcatctgaacagcatgtatattgtttgttgttcagccccttcagggattagtcaaataatatgtttggaatcagataatgagtcggaaaattgtggaatgggcacacgggacaaaaatgaaccaagagattctagatggatttcaaattcaatggggtctggaagttctcctggcatatgcttggaatcagataacgtgttagaaaattgtggaatggacaaaccggttgagaatgaaccaagagattcaagatggacttcaaattcaactgaatctggaagttctcctcgtatctgtttggaatcagataatgagctagaaaattgtggaatggatgaacgagatgagaatgaactaagagaatcaagatggacttcaaattcaatggggtttggaacttctcctggtatatgcttgttgacaagttacatttgttcttcaccacctgaaatgatttgtttatttgtttatgtaattgaaaatttcagacaggcatatttcatggggaaatgctactcaaactgaaatgcctggggatgacctttcaaatccaacctcttcacaagtggttagtcatttgatcatcattttccgggttgtgtttatgcacatatatgtagttatttattttctatttgatttctattggtaatataaaatttgtttattctaattgtatttgcttcaaacgaaaaagtggactgtgttgtttaattctgtgcttcttgcatttttctccatgcatctgagagaatctcatactattgtacgagttttatggtcatgctgattaggaaaatgtgaacatgcagcaagaggaggacgccaataatattaaaaaatccaaagtttctgcaaagaacacaaccaaggcagtgggaaaaacaaaaatgacaaaagaagaaagaagtcgcttgatggaggaaaagaaactacagaaagaagtgcgtttcagtttatagctctggtcattgtttatacattatatcattcagaatatgatagctcatgaaaatttattcttcagcaagagaagttaaaaaaagctgctctgaaggctgaagctgcagaactgaaaaaaattgaaaaagaaaagcaaaagtgggaaaaagggaagtttgcaatgaaatctattgtggcagaaattgatgtgaaggtggttgaatcaggttcaattggaggtaggttattgatatatgaatccataagtacatgataaatttctacatagtttatttattatgaatgttttctcttaaaactaatattctcttgtttatctgaattcttaactacaaaataagttttaatgcaatttattattgtgattgttttcatataaaaccactattcccttgttgcaggacatctgcttactaggtttgctgaaaaagggcttacataccatattacatcaaatccaatcgcagggtcaattttgtggtctatgaaagttccagaacatatttcacaggtaagaaatgcctgcagttcatctgtaagcatcaaatcattaagcactgcctgtagctaaattcagggaggagaagggggagagcaattagttacatgagttctaagctggttataatctcatgactcgttgtctgtgcattactctttttggcctcaggagtagtcttgtatgtttcctcatctgcattcttcattcaaagagttgaaatggatgttttaagtttcaatcacacacacatgtatttatggatgtatttagagagggatgccatgacattaacatatgttttagtaatgacaagtaatccatcatacacacctgaattgtgatagacttttaggcctggctagtgtagaactatctttatatatctaatgaaaacttttttcagtacatccaaattagatgaataattttttgcggattcttcttttccactgataaaaatttcatttatttgcagctttccactggaagaattgagattccatatatcttgctcatttatgaggctgacaaattttgtaaccatgttatgaatgattctctttttgatcaactctctagcattcgaagtctttatccagcttatacagtttgttacctcaccaataggttattggcttatattaataaaaagtgagtgatatattacaattttctgaatacttcaattctaccagcaattagttgcatttatgttttaccgtattgtgctatgttgatatagtgtgtccatatatttgctaaatcatccccagcaccagataacttaatattgggtttcaatcaaactcccaaaacaaattaaaggaatatagtataattaaaaagttagaactactcaacaacttttttacagtataaatgcatttgagttaactttaatttttacttactcatgctcatatttattaaccataaatctcttaaaaaagtcagattcatcagtcatcacccatttgatagggccctaattaggtaatggtaaggtacccatctgtattcatttacacctctgtgaacttttttttataaataaattacaaccatataaattgttgaaaattgtatgaatgtaaaatattgtgtagttggaatttggaatattgttttaacgtacctttcttgtatgagagatatgatgctcaaacctgcaccttattttccattctaaacgtttattttaaatatacttttatgaatatgagatttacttgagttgcatgcagtaaaacttttcttttttgtattttaagatgtacaggttatctggatatttttctaaaattacttttgaataggaattccatttaaatattattgaaatagtgtaaatgaggagtttcggaaaatcatatgcaacatttgccaaaatgcaattcctttcagctaaaagtaagaaaacttagtccagacagaatgtaagtttcatgctgtgcaaggtagaaatgcattctgcacctggtttccaaatgcaagaaaaattgcaaaaaggatgctgcgtagtgcatacagccttctttacacacaattcacacatactagtattttcctctgtatataattttatttaaatatctgtcaatgatttctgatactttagttttgcccaatttatttataacctacaatttcttttttgatttcatgatattattttgttgaatctttgtttttgtgatctgttagggaacaggaaaaatataagaaccctgagagctatagttgttggagacgtccacctgtagaggaggttgaataactggccctttcattttcaaattacaaggaataggtcatgttttaaaattttaccttcttgttcaaacttgtctatcatttttgttttaaattgtcttgtaggttctggcaaaactaacgactaatttcaacaaagtacactccaggcagtgtgcagatgaggctgaactggctgaacatgttgtcggtttgacatgtagcctagcatcttgtcagtttaggtacttgatacttgtatttttggtattgtcctgtcaatctttgaaggaaaaaggctttatatgcaaaacttctacatgtaaaaccagttgcgcaaaatccattaaagggtacattggtgaaagatggaatttgacatgtctttactatatctatgttataaaaaaaaaccattgttttcatccgttttcccacccatttttcatgcagacaactcatttctttaaatttttattgaagcattaattctcagtttgcaagaacaacttaagtcctagaattgaagttctttcacgtatttggaagacacaatacctgtcttttaacactgtaaatatgttccatattcgttgtatagtttatcttttataattgaatattgcaccatttttatttatttaaactgcagaaagaagttatcccgattatctgtaaatgcaaatggagcccttattccaaaggactacgttgaccggaatttgataaagaaatctttgtggtgagtgattttgatattgttatattgcatagagaaatgcatcctcttaattacttaaaacaaaaagacgaaaatgcttaagcatttaagttcttgccaacacaaaggcattgaatacttttttcttttggtaattaggagaattgataggctgaatcgtttgatggattagtaatttttctattgcataaactctttgaaacaaacacaaggcctctgtttttattacccattaccagttgttgtttactttgtttttgatttattttgtatttatctactagagtacttcatatctgttttgtcttttcaacttgtgttcctcaccttgacttccatgactataggttaaaagctttggttgctatgcccaaggtacagccacgattcgccattgctattgggaagaaatacccaaccatgaagtccctgttaagtgtttatatggatccaagtaaatcggtatgtgttgttaagatttactctgtttgctttgaccttcttgattgattgcacattgcagtaaatttggtctctaatatgtagtctgtttggcatcttttagttgctttagttacaaataattggtgaaaaaaaaaaggatggccagaagttttgattatccttcttaatgatggaaggtgcacataaaaaataagactctgctttaattgccacaggagcatgagaaggaatttttacttaaagacttgatgaccgaaggtttgcttggtggtgacagaaggctaggcgaggtgtgttcaaagagagtatatagaattctaatggcacaaagcggatgcattagaacagatgatgtcgagaacggtgctgatttctttgaacgtcaatcatgaagagctttgtccttgtatgtaaactgtgtttaagaaagggtgtctacacttttagatgcttaatcgattttacatttaataagaaattaaaatctgttattattttatataagtgataaactattttgttatattttttcatcactattaatgaagttacagtgctggttataatcgggtaactattatgaataatattagtgattaaataaaagcaagtcataaataatgaataattattaattaacgacaacctttaaatttattactgattttttgtctctaaaatatctaactttctatgtaatgattgtttttgtacaccataatttgtacaattattttatgcaacaaaaaaaaaaacgaaaaaataagaagagaagagagaaaattaggataagattgatgatgtgatagagttataaagagaaaataatactgtaaaaaaatatttattattactaaaaatattgtctacaataaagtatttataatagactataaattgttgaagttttatttcttaaatgtttttatcacatcttccaaagggaagagtgactcaaatgattataaatacactataaaacaagcagagaaagttacatttcgtgacccaacttcttatttggttcgtagaggcttgatagattctctggatcaagtcgaatatccattgcagaaaaggacttgcgcaagggaccaagttcattgcgattgatcatatcaattatagatgcttgccagagggtatagttttttatattcttaagagcattaggatgaccctcagttttgggggattttctcacactggagagaaaaacgggggatataaatgcattcatgctcctctctttcataaagagtgaccatgtgctgcttccacttttccctgtttcttcacattccatgtcttgtgccacactcttctgtttccaaaaccaaaagcacacaagttattatctttgtcttcactatatgcaaatagctagctacaatagttcttttaaaaagaatgagtagttcgtacgagattctaagttcaaacttcattgtcgtcatggtacatactattaaaaaaaagttccttaaatgtgaaaaaatatatcaaataatttgatgaaactgtttggttggaaatcacctcttttgctgattctgaatctctcctgcttggttctgcagtttggttctttcgtgactgactcacattgtatgcacttgtttgatatacacgccctttatttttcagacccttgcgccttaatttgtcatggaaagtaataaacaacgatcaagatcagtccacaatatgaaatccaatgctgcactctagttaatagttaatatatcaataacacataatttggttcacacttgtgtgaaagacaaagcttcttagttctaaactgatagcataccttttgcgtctctttgtttgtgagcgttcctcctcgtctttgtagatcactggtaacgctgaaaggtcacatgctaatggacttgatgtgaaaaactgtaagcagtcaacccttagcatatagcaatttcaattttcatataatgtttttacggcacataaaaattctatttttttcttcaaacttttgaaagtttatacatctgtatgagacttgcaaatttagttagaaagccttgctaactttcaaatatcaagtggctaattcaggatttgatcttagtgtcaattaatcatgatgttcttcgtgttgaaaagcgaagactaaggtaaagaacaatggaacgacagtagttatcttattttatcaaaggagcacttctaatcttcattaaacgtcctcttcatcaaataaaaaatatcaacctcatttttttatagatattaaaaatatttatctttattgcaagagtttaatttcagacactattacagtcttgctaagtcattcattatcaaataaaaatacatcaaagtgcacataaagtaacaagaagcatgattaattagcaacaagctagagaagtaactcacttcactttcaagagcagaggcagcggtgccacgagagtaagagtcgagatcaagaagagcggtcaagagagcacaggcagaggaaggaaaatccttgaagttttcttcataattagctttataatgtgatggtggacggaagcttgtcattagcttcatttttatccagtaatccgctgaaggtgaaccacaaagtttgaaaatcatgtgaagctgttcaacctatatacacaaaatgcttagcagctgatcagactccaaaagcttctattagcagctttaattaatatagaatgtaccaaatgcattcacacattcataagatatgaatcagacttaaaatatgcatttgagatttcaaccatccaatcttcatcgatgccaatttatgattgtgcgaatgcatgagttcaaagaattcaggtcaatacccaaatatagtagggggacaagagaaattattatatggtctaacactatcatgtcctggacaatcttctcataacacataaatttaactacgtactccattgtccaaaggttcttcactatgcaaagataagggagagagatattatacgcagtcttacccttgtatatgcaaagaaattgtttccggattcaaacttatggccaacaaatcaccaaggcacaactttaccgctgtgtcaaggcttgccttctcataacacataattgagttttattaattttttctcgaagaactcaattatgtgtcatgtagaagttatttatgatcatagacacatcacatgtagtagtcctagaccatgtaataatttctccatgaaaagagacaaaaatagttagttactttaacatgcatttgagatgacttgatataagtttccaaaatgatcagatcaatcatcattgtgtatggtgtccaagctaaactctttcattattttaatgcattccaaataaagttttacctcggtcctcccgggcataattggtcttccaagaaacatctcagccaacaagcatcctgcactccagagatcaatttcatatccataatctgttgatcctaaaagaagttcaggagctctataccaaagtgtcaccactcgatttgtaaaaggtccttcaggtttgatagcaaaagaatttgccagcccaaaatctgcaatttttagcaccccttttttatctactaacaagttagaaggtttaatatctctatgcataactcccctctcatgacaatgctggagccccaaaagcagctgctgcatataacacttgatctgcataaattgcaactagaccactgttatcatttcatcactagctaagtgctgatccaaatatcaacaacatgaacaacataggaagtgactaaagatttgtaagtttgagctattacaaatcctatatttattaataaacaaaatcaagagatactaaaataaaagaaacaaatcatttatatgtagcctttcctagcagcaaacaattacaatttacaaacatctcaaaatgaatcttaggaataagaatataattagctcgaatgtactttcagtataaaagttatttatacttccaatccttcatagactgtgatgaatgggattgttaactttcgtaataattattttaaaagacatattcagaatgatttctaatttattgacgatgtaaaatctttttatactgagagtgtatcgaaattaatctcaggatagaaaccaaacctgtggttcagtgagtttctccccagggcggaagataattcttgtaaggtcagaatgcatgtaatcaaaaacaagataaagactatactgcatccttgatgttgctagtccttccagttttatgacattgggatgatccagagcctgcagtatcattatctctcttgccataaactttatgctttcaggatccgttgtgtcaaatcttaccttcttcaaagcaacaatcttcccagtatttttatctcgggctttgtacacattgctatatgttccacggcccgcctacaaccccagataaataagttaattgcttctccaatcccttcctctgtatgtacgacaaattattacagtacatgatttgatatcattatggtaataactcctaaaacaatctttacatgaatgtaatagagttttattgagacagtagagggaatagacacgttatagttgcggatcatataataatttctctaaacttacatgcatgtgaagaagagaaagaacaacctaactgtccgttggaagtaacaaggaattcaaggagaaagttcaaaaattggtgtaggtatcaccctttgtcacaccacttttatttttttcccactgaacaggagctaaaattatataagcaaacttaagaaaataatcttgtggcttagtatcagagaaattttccgataaatttagctagaaaatgtacacttttatataattttacttacatacagctttatacatgaatttgttaacgttaaagaattaatgttatttacatgcaactttatacatgtttaataaatgaaatgtacactataactaaggagtatctgtaagatttattattgtgactcatttaaataaatgttatttgatttaatgaataaagggcataaagataattggttacaaaggaaagttattaaaggataattgttaataaaataattatcttaaacgtattaaaaagataactgttaatatatgcagttatattaaaagataactgttgataggtgatgagagttgtatcaaatccctatcaaagaagatacaagaaaagaaagggtcaagactttgagaaagcattctgtcattaaaggatttttcccaaagaatctacgaaagcactctaccaataaagatcttccgcaattatggacaaaggtatgtttatgtgaaactcatgaattctaaaggtccttttttcatgttcttgatgtaattgttattgaacatgaattatagattaatgcttacatgtggtatcagagcatggtttaagaatttgtgattttccattattaagtttttgttgttataacaataaagtattatggtagattttgaatcttaattttctgcttgttgcgaatattattgatcgaataatgttgatagaataatatcacataattgttatttctcacttggtatgttttatgttccaatggatatcatgctaaagttcttatggtcttttcaaacaaagacacattaatgttggtgatgaaaagtaaacaataatgattgatcaccttattgctctccctattaaaaattgtatcaatgcatatttaaaattatatttgataaagttatatgcattgttgtattgtgatcgaatgactgtatattttgatgacattgaaaattataattttaacatatttttgtactttatgaggtgtttatattttggaattaaaagtaaggtggatttgttagtcaccaaagtggccaaatttgtatgagtaatttaattccaaattgtatgtttatttcaagtttggaattaagtatggtgaatttgttagtcaccaaagtggccaaattcttgatgaattgattagttccaaacattatgattatgtttcaattaccataactttgatgctatgaatggtataaaattatagtttatgttgtggtatattgaagtttattattatgggacagttaaggatcaacccaaaggatgattatttgtcgtcataataaataaacatgaatgttgacataatagatacatggctagttctatttatatatccaaagatagtaagtaatcctagttagtatatgtattaatgtcaaatcatgaaaaatataatttattggcatcattatagcttaatgttgtgtattaatggatccccaaaggtgaacattaatatgcattttatgatgtatgaatctgtgaattatgttagtatgtgatatgtatgattcaaagcattaatttttcaaattttataccttgcagtacctgttgctacacattcgtttttctcaactattacagtttttaatggactaaacttctctgaatggacagagcaaattgaattttaccttggggtaatggatttggatttggctcttagagaagagaaacctagtgctattactgatacaagcactgagtatgaaagagtccattttaagaactgggaaagatcaaatagattgagtatgatgtatctgcgaatgagcattgcaagcaacattaagtcaactcttccacaaactgaaagtgctaaagaaatgataaaacttatggaagagtgctcccaaactgctgacaagtctcttgctgggacactaatgagtaaactggccaccatgaaatttgatggttcacgtactatgcatgagcatgttattgaaatgataaacattgcagcaaaattgaaatcaatgggaatggctgtggatgagaatttcctggtgcagttcatattgaactcattaccgtctaatatggtcctttccaaatgaactataataccatgaaagacaaatggaatgtgcatgaattgcacagtatgttagttcaagaggaaaccagaattaagaaccagggaattcattccatcaattatgtcaaacatcaaggagctgaaaagagaaatggtaagaagcatgagaagaagggaagaggaccattaaagatcaatcaggtttcctcttctcaaatccacaagaaggaaaataatggaaacagatgtcatttctgtagtaaggttgggcacttccaaaaggattgcccaaaacgtaaggcttggtttgaaaagaaaggtaagccttgtgcttatgtatgttatgaatcaaatcttgctgaagttccatataatacttggtggattgattctggatgtacaactcatgtttctaatattttgcagggattccttaagacccaaaccacaaggccaaatgaaaagtttgtcctcatgggtaatagagtgaaagttccagtggaagctgttgggacttaccgtttgatccttgacagtgaacatcatttggacttatgtgaaactctttatgtacctagtatatctaggaatttagtttctatttccaaacttgataaagctggatactcttttaaatttggtagtggtagtttcagtttgtacaagcacaatcatttgattggcaatggtactttatatgatggattatataaattatgtcttgataatctttatgctgaaacgcttatgactctgcatcataatgttggtactaaacgtaatttaattaatgaatgtttcgcttacttgtggcataaacgtttgggacatatttccaaagaaagaattgtaagattggtaaagaatgaacccttccggatttagattttactgatctaaatgtttgtgtgaattgtatcaaaggtaaacaaacaaaacacacaaagaaaggagccacaagaagcactcagcttcttgaaattatacacactaatgtttgcggtccttttgatgttaactctttcaataaagaaaaatattttatcaccttcattgatgattattcacgttatggatatgtctatttgctacatgataagtctcaagctataaatgctttagagatttacattaatgaagttgaaagacaattagacagaaaggtgaaaattgtcaggtctgataggggtggtgaatattatggaaggtatgatgaaagtggacaacatccgggcccatttgctaaattcttagaaaagcatggtatttgtgctcaatacacaatgccaggtacaccacaacaaaatggtgtatcagaaaggcgtaatagaaccttgttggacatggttagaagtatgttaaataattcttctttacccatttcattgtggacttatgctctaaagactgccatgtatgtattaaatagggttcctagtaaagcagttccaaaaactcattttgaactgtggacaggaaggaaacctagcttaaggcacctgcatgtttggggttgccaggcagaaattagatactacaacccacaggaaaagaaattggatgcaagaacaatcagtggttatttcattggttatccagaaaaatcaaaagggtatagattttattgtcctaatcatactacaaggattatagaaactggaaatgctaggttcattgaagatgatgaagttagtgggagtgaaacaccacgtatagtggcaattcaagaagtgagagtacaagttcctttgacttgtagctctagtaaagttgttgttcctcatgttattgagccaattaataataatgaagaacaacaaatgaacgattccattgctcatgatgaaattattgacaatgaaccgaatgaacccattgtagaagaaccacaccaaatagcattaagaagatctcaaagggaaaggaaatctgctatttctaatgactatgtggtatatctacaagagtctgaatttgacttgggtataaaagatgatccagtgacgttttcacaagccgtgaatagtgaaaatggtgacaagtggttaaatgccatgaaagatgagttaaaatctatggaacagaatgaggtttgggaccttattgagttaccagaaggatgtaagagagttggatgtaaatgggtctttacgaccaaacgtgactctcatggtaacttagaacggtacaaggctagactagttgcaaagggatttactcaaaaagatgacattgactataaagaaacattttcacccgtttcaagaaaggattctctaagaatcattatggcattggtggctcattatgatctagagttacaccagatggatgtgaaaactgcctttctaaatgggaatttagaggaagatgtgtacatggaccaaccaatggggttcatagaaaagggaaaagagcacatggtgtgcaaacttaagaaatcaatatacggacttaaacaagcttcaagacagtggtaccttaagttcaatgataccattgtttcctttggatttaaagaaaacactgttgatcggtgtatatatctaaagatcagtgggagtaagtttattttactgattctgtatgttgatgatattttgcttgcaactaatgatcttagtcttttaaatgagactaagaagtttctctctagtaactttgaaataaaagatatgggtgaggcatcctatgtgattgggatagaaatattccgtgatagattacaaagattgttgggtttgtctcagaaagcatatatcaataaagttttagagagattcagaatgcaaaactgctcatcatctccagtaccaattcaaaaaggagacaagtttagtctcatgcaatgtcctaagaatgaattggaacgaaaagaaatggaagcaattccatatgcatcacttgttgggagcctaatgtatgctcagacttgtacgagaccagatattagctttgcagttggaatgttgggaagataccagagtaatcctggtatggatcattggaaagctgcaaagaaagttctgagatatttgcaaggcactaaaggtcacatgcttacttataggaggtctagtaaccttgaagtgattggatacacagactcagattttgcaggatgtatggatacaagaaaatccacttatggttatctgtattttttggctgaaggagctatatcatggaaaagtgcgaagcagtctgtaattgctgcgtccactatggaagctgaatttgtggcatgctttgaagccatggttcaggctaaatggttgcgaaactttatttcagggcttgaattggttgacagtattgataggccgctgaaaatttattgtgataattctgcagcagtcttcttttctaaaaacgataagtattcaaaaggtgctaagcatatggaattaaaatactttgccgttaaagaagaggttcagaaacgtagagtgtctatagagcatgttagcactaattttatgttagctgatcccttgacgaagggattaccgcccaagacatttattggtcatgtatgtagtatgggcattatgtcagataatgaatgttgatcattattgtaattattgactattgacactctgaattcaatgatgtttaagtttctgaaaattatcctgttttcaaatttatgtatacatgcatgtataaatgattattttgaaaacacaggatttgtccctaatgaagacataatagtacattgtgggacattatgatgtaaacttccattaaagtatcatattaggaagaagagctaatatagtggtacatggaaggaactatgccgatttgatagcatataaccgccatgactcttattggttttatttctgatcatgatttatgatgagaccaatgtatgaaaactttagccctatgaatgcgcattataattgttttcattaaatcatgaaatgaaatttatgacatgagccaagtgggagaatgtaagatttattattgtggctcatttaaataaatgttatttgatttaatgaataaagggcataaagataattggttacaaaggaaagttattaaaggataattgttaataaaataattatcttaaacgtattaaaaagataactgttaatatatgcagttatattaaaagataactgttgataggtgcagttatattaaacgtagtggttcagttttcttaggaagagagatatctagaaaactgaatatcaccattgtctgcctatgagagttgtatcaaatccttatcaaagaagatacaagaaaagaaagggtcaagactttgagaaagcattctgtcattaaagaatttttcccaaagaatctacgaaagcactctaccaataaagatcttccgcaattatggacaaaggtatgtttatgtgaaactcatgaattctaaaggtccttttttcatgttcttgatgtaattgttattgaacataaattatagattaatgcttacagtatctagtcaagaatttatatatatcacaaagtattactctccttctctctttcagattacataaagtttaagattttaacacatatcaagaaatgtaatgaattggttgaatttcataaaaaatattagataacttttaatatatcatttatctctttaattaattactctaactaaatattgattacggataattttgacaaaaaatatacttaaggttacaatgattttataataaaaaaatttctttaaaacatatagaatggaggaagtaggtgttaagtacctttccgagtttgtcataagaatcaacactcttgggaaccaaactagccaaaacgtttggagggatattatcaacgagccattttggccagccttccacaaactcatagcgtgcaatgttcttcttctcctttgaaacattacgaagctcatgactcttgccatcgtttgtagcaacaccctctaccttgctactagtattatctctaatttctttgtcttccaacacgtcaacgtgcttgttagatgaatgtatagtagtgattggtttgggtgcatgctgctccttgtttcgcttcaacctctcagcgttcctccggcttcggttccgaggaggatcgtatttggtgttaatgcatcccatatggcgactcgaaactgcgaatatctctgtttcagtcacaaccacggcatatactataatatactatatatatctaactataaatttaaccgacactaataataataagaaattgtctaaccagaagtatctataattttttatttgacacttaattaattctctcttacaacataaactcattttaaataaagtgatatgtctaattataattctagatctaataggagattgactctcatactttgattaaaagactcaagtgaaaaataaattaacaacaacttttgataacattataatgaaatagataaaaaaaattgttttattatttctaaagtagacttaatcgtatgagctactactatgattttattttctaagatgaaccttcttttagaaataaagaataccagcctgttagccggcacaagacagagaattgaaatatttggaattatgagtggtaaaccctggctttctccgtcaacaatgattgagtgtttgagtttgagtgtcgtatcatattagaacaccaatgtttggatttcatcagacaccaattacgatataggattaggaagcaactatgtattgttcgacatggaccggctcttgctcacaacaccaaccattaattaaattaatttgtttgtctttttatgatgtgccgtgtgtttgaccactgtttattttattttattttttaaagaaaagctcccatcatgcagtatacattttgggagaaagaaaccatagataagaaaaaaaataattaaaataataatatgatgtgataatatatatctttatatatatatatataataaaagtgatgcatgttttgatttgtgcattttttttatccaattttattcttcgatttgctatgtgtaactcccacttttctattgacgcttctgatatttttctttttgggtacagctgaggttactgatatattctttttagatattttgtctatctttttaaaatgttatcttttcactgttactgtaaattacttcactattttattctaattctcaacctcctatgtcagttatattaataaaaaaaactatattaactatatacgacaaattcaatttcaaaaaataaaaatacataaactcatacatatttgtctttccactagaatatataaagtaggttaaattaattatttggttgaatgagttatttgataatatatatatatttacgtatatttattttttatactttaattttataaactttaaggaaaaaaattattagttatttcaacaacacattgatcaaactaaatatctgttgataaaattgattttgaagtgatatgatttatatttgaatgttttattataaaattaaattaaaattaaaatttattacaaaattttaaatcaaacacaaaagttactcaaagttgttttaatttagaataaattttaaaaatccaaaatcaattataaactcaataaattttcaaacttcaaaccaaactcactaaaaaagttgatcttgaacttcgttaaaccatatttgtaatgcacattaaacataattttaaactttgcttaatttgtaatatatattttttacgttttcataatttaacagaagtattattatgaattgtattattttgtaccaaacacatttaaataaatcgtacttgatatcttttgcatgttacctgaaacctgatagaagctaatcgaaaataccaggcatcaaattgtagtgcttaaacttaaaaatgcaagaaaccaattgaatagcaatcattttctttccacttatatgtcttccaattcgcaccaaataagatttagtctattccagagtaagatgaaaggttcaaaagtatagcatgatcattataattacatttcagcacatcactcgagggatagttgacataaagccgaaccaaatcgggaccaaagcgaagacaatccagaagagctaaatattagtcctctcagtggctatgctttaaagtttaaacctgacacagctccgtaatcagtattctgtcaggctcgtatcttcagcaagtatcgctattatgtacaatttcctttttcttctttttcctgagaacgtatcttcgaaatggagtcatttgttcaacaaattatgcatctgtgctgctatttaacagatttgccaatgctaagaccgtctccaccaataagcttctttgcgggcatgccaagatcaaaaggtcccatagaatcattctgtattcagatagtacattacttaaatcagaaatcaagatattaaacataataaacactaaaatgcttcaatgaaaaaattaaatacccaattgatgcctgttaacccaagacttctatcatcatcatatgggcgtgaagaaagcaacaagtctgtctgagtcttcccggatggaggattttgtgaagctacatcttgatcattgacctttaaaacaccacaagagacaatgaagggcaagtaatgatggataacgaagcttccatacaactccatagcctactaatggaaacataatctcattcattcccacatcaatttgaaccccaatatccgtcctattgcaacactagaagttattttattaacaagacatttttgtggagccttaggttcatttgaaactacaaatattatgttcatagaatacctgttaatactaggtacttctaaagttgatgatgataataatatcaagttatacattagcttcttaaaagcatctatctttcagaaaagttacaaagataaaaaattgttgagttatcatacaaaaagcactaggtaatttttccatcagacgcaccagctaggcagctacattaaactatttcacatttcgataatggattttcattgaagactgagcaactaaccttatctgtatttgacaactttaacaggtttgaaaaaacaccctgactgcagacagcagaataatccttcctacaagctgcctgcacatctgttggggaagataaattttgaagaggaaatgcatgacatgtctcttcagcatccaaaatagatgtgtgcaagtcatcagcaggtagtcttggaactgggcaattattaatttgagcagcggcaataaaagcatccaatgaatcagaagttatatcacacggctgtatgccagcaaatgattttggatcaagcccgccaaataatgatgcttcagacaggaggcccccaatgcttatattgcttagactatcaacccatggagatgatgactgttgaaggctgctacttattcttgcctcattatcctagttagaacaaacatgcatatcttagaaaacaaatatttatgatgaaatgtgttggaaattagtctattattagaacataaggaacatattgaaactgtcagaggattggcattcaaaattcattttagaattcacaaccaaccaacaatagatttctcaaacatccaataaaggtccaaaaataagaattatatatgcacgaaaactacccaagtgtttatggtgtcatggtatcacaaataagattaattaatgacattttaactttccttttaaatttttatacgacattccaaaacttttcccaaaattatatcagtatttcagtcaataaagcaaaccatcataaaaatcattttgttgttctttgattcacacattgatgggcaatttaagcaactatttgctagttattataatgcacaacaaaatagctatcagtttaccataggatcaactgcagcgttttctactttctgagccacagtttcacttgctgcattgcccacttcggtttctttgtattctttgcttatctcaaccttgtcccgttcaccacataaagtctcctctaaattagcattgtcgcctccgggtacaacaagcttagagggagttggtgtggaaggtataccaaaagacccgggctcatgcatgtagaaccatccataccttgaaagggagaacaagttacaacactataaatataaactacctaagttccacatagaaaaggataaataagatagatgatcagatataatacttcatccggaaaagtgcaggagttccaacagcagcataaacagcagaggctgttgtgtcactatcgttaattgtccaccttctgcagtcagatagattttccattacattatatggaaaaagtataagctcccctttggctatacttgaacttccccacttctttccaaggtgttttaatattgaagatattttctttcgacctctaagtgtgagttccaaataaggattatgcccatcctgaaaaggaaatagtctaagcatcaagacctactgcatccagactaggaaagacatagagtacatccaaatttgccaatgctacacaaataaccatgtgaccttttcaagtcctatccgagtttcttcattaattggaaaaagttgtaacttgatttttgcagaagtgagcatttgtccaggatgaagttcaatagcctctctcttctctgtaataaaagtacacttgttggaaaattctgggcactttctcatatgttccttaaatggaaaatactgattctctttatcagtcaactcttgaccgcatcctaaatataaaagatttaacgatattaaacaaaatgtacaagatagtggcaattgaacacttgtgcaaatttcaaaactagtgttgcctcatccaagaaaataaaagattcattttttctaagacacggcatattcagtgcatcaagggagaggacaatatgaaaccaaaaatactgttaaatcaatacaaatggtggtttgacaaaaatgcatcacctcttgctttgttatccaacttatttgttcttttgggagaatttctcactccaatggatcctgtctttagattgcactttccagaagccttcacagctttcctgtctagtgatctgcctgttttcatgatagttcaaccttcctgaaaatgatgataaaataatccttgttgttattcttcttgagaaagcactaaagaatagccaaaaaattaagagaaggcgccaaaatagctagttagagaaagagttatgtaccagtaaattcatcaaacaaaaatcaccaggcttgctttcagtacctacggttttgacatcacaaaaccaaataaataaaattagatactagtaaaagggtcctgagccctgacatgttatcagattatagtcctacaactaaagttaacacaaatccacgcctttagagaaaattctcacattggaaacaaaacaaacccaccagtataagaataattatgcagacactatcagcttcaattcagcaaaacaaattcaagatttgcacaaattctaaaatctcaattccaaacgaaatttaccataaccgaccatttttttcatatttcactagaattatcaaagacatcctttcactttccattcttattcatacaattattgaacatgagagaagggaaaactaagtttcaaggaagacacaagagtcatcacacagccctaattgtgatctggatcacaacaatgacatgccataagacatcctaacactagcatcatatatatccacgcgcaccaaaaaccctaattcgattattacacgattcagattacaaagaaaacaaacattccaacactaagatcaaattaaagaattgtgttacagaaaaagagtgtcacaaaaagtaattaaggggaaaaaaattaaggtgaaggggagggatacagagatgaattccattaacaatgaaagcatgttttacagcgggaaatggtgaattgagtatagcgatgttaaattcaataggttaggaagggttgcgttaagaaccttcgagaagctccgacggagggaagaataactgaacggaattgcagagagagagagagagagggaacagaaacagtgtgcgcgggaatgaatgaatgttgaaagtttgtaaacggagggaaccaaagaagcaaggggccaccgaatttttcaaggccaaggcggtaaaacttttttcagtttttttttcttttgggggggggggggggggggggggaggtccacacacaaacacgttccgtttacgtttcctcttcagtcttcgtggcattttcaaagtatgggcctcaaacaaattaagcccgtcttggggtcccaagatttagatagcttcttaaacccttatttgttaacgagggtaaattctttactttttaattttttatgcagttaatatttataagcaaaatgtgtctaggagaataaatttttaatttgtattaatttttatttcaatattattaaattgaaactattataaaaagtatcatctcttcttctttcttctaaaagctttcattcaaatccaggggaaaagaattagtatttaacaaaaagaatgttagagaaaatatgactaacattcctcttattaaaatagacaaaaaattgagtaaaaataagttagtttgggcagaaagaaatgagaaaaaaaaattgttttaattaagggcattttatgaaaatgatcactaatgcacaagacattttagattaaactttaaaaaaaggaccatgtcacacttttaatttggaccttataaagaccaaagcaaaaaaaaaattacaaacttttgcaaaatacataatggtataacaaaaaaaattaaaaaaattatttaagcttcaacacattacaattgtcctctacacattttcacactttgaaaatattttatgattttttcattgttaatactataaaaagttaaaataataaaattagtatcaatttattatttttttatatttattcaatttttaaaaattatcttgtggaagaaatacttttttatgaaggcaatatttttattacatacatacaaaggcacaagggctggagcgtgacgagggcacaccatcatcgatgtcgctccaaagattgacaacagcaaaggcacaagcctcgacaaatatgcgatggttggtgtaggagagagagcacgaagatcttggttttggtcatggccacagtttggcagccacacggtggtgggagaaagagaatgaagggtaaaaacataaaacatgtagtttggttctctgtgtcgacatttatcgtcatggtgatgcctttaaattttgttcatagtctctgatgacaaagagaagcaaaggtaaaacaaatgtgagtgacgaaaaagggaaatttttcccttgacattttaattgaaaacattgtgcattgatgtgaaatatccctaatgtaaaattatcatgttaacaacaatatgtcaatgtatgtactcaacgctaatagaaacaatgaatacttgactcttagactaatttgttacaatatttgcacttatgtgaattaaattgattatttccaaagtataaagaccaaatgccgtcattgtgaaattcatttaaatcacgttcaacaagtaaaattagtttttaatctagtgtattagaagatacatgtgatatctatccattacaaaaaagaaattatcatcaaatacaaaatataaaaataaaaattactatttatccaattatctaagagtaatagattatagagaaaaatgacaaatatatcaatttggtcctaaaataatgggtatttaaaaaaatgctataacatattttatataattaatataattttattacaatacagtattagtaaattttgttatctttatttttattcttataaactttttaataaatatttgaattattcaattaaatctttaaaaatttaattagtaacattttaattttatatgtcaatttcgtaaatatgttgatagagggagataatatcttacattattttttaacccaaccctgtccacttaagagagaataattaataggacaaaataaccatatgttatttcacccaagtccaaacaattgattaaaccaccaaattaacatcattttttttttattgagtttgaagattataataattgtctatctaattatttggattaatcaagaatttaaaattaagtaaatagcagaaagatgtccatatatttatactgaaatgaatttaaatcccaccttctaaataaataaaacagaagtgcattttcctgtaaaatcaaacacctaaacttgcaaaatgcaaaacttcagccactaatctcaaatcctttcatgcataattcaatgcagcccaattcacaatcatatacacatagatattgatttaggaataagaataaattctctagtagtttacttcgcaaaatcttatgcaaacatcacacactagtatgactatatattgcttgggaaatggccaacatttttcaagaactatctgtttaaacatgtaagcttgatgttcaagctttcaaactggacgacaatgctacacaaataaattgaagttgatccacaataaatttgacatttttcaccacagatttcataaatgacctctgttctgttccctattctaactatgacagcatcagtatgaaaaatcatgaccaggactatctgaatgcatatccatgcaatcactggagttggaagaatttgtttccctgttctggccgttaggataagtcatgtcactgttccgggttccatttcctgaagacatgatattacctgaaggaaaactcccctgtgccaaatgatatggctgaaggctgcgccgaatggggctagagagtgcatttgagaacactgagttctttggttgttgatcaggttgtccagcttgtatcccctgtgctgccacagttgctccaaatgcataagagggtattgacacaccaaagttagcgttgtgcattgcagtctgggagttctgttgatacattggttgccttggggacactggtgcctcctctcctccatattcaagctcattctacatgcacatgcatagctcaaggttatgtacatatctaaaataagctattaagataaatctgaaatcagatacattcattttgaaggatagccggaaataacacaattatataaaggaaattccagtccaagtgaactgaaaagagaaaaagaaattccttttaatgctctggctgtaattcaacaatcaaaatccggttggcaggtggcacaactgcacaagacctcttacacaaataaaaatattgggatggtgaaagggcataaagccattgtattcagtgtacagaaaaatcagagacaagttaaaaggttttctggtagactggtacatcaatgaaacttagatacaattccctaggtgaataaaggtttgcattaaagattagtatagattactgaggtaaaactctaattttggttagagaagattgtcacaaacacctaagaaattaggtcgaggttttgtcctacttcaaaaaccaaaggtctaaggattatgtccatcaaacaacaacttcacattcaaagcaattgacaaagggatccataagctatatacatagatagagttgatgaaatgtccttaaaccttgttggatggaggaaaaaacaaacaggaaaaagagtatctccatcgaaaaagtaacacaaaaggcacaacatacaaaaaaaaaaaaaaaacaattgcagagacaacaaaattgttctgttatgtgataacagagttgtccggtggtatcaccggtggtgtttgtatgtaggacctgactcttcccggttagtctatggtgatcagaccaacgacagaagacgagatcacggacacgggagcaatgggggtgctgtgtgtgccgtgtgaaattgagagaggagggccagagtccattatgcgtacctttcaccgtcgagtgtttctgccttataacctttcgtccaggccggaaatgaggcattctgtctccgggattgtagccgtcgagtcctctccccttgtgcctgcaacgaggatcacgggtcatcggccggtaactgctcctgcgtcatcgaggggaatccctgattgcgcgggttcattaacgaggaggatatgggagcatatccgtaacagatgcccctcgtcctggttctccagtattctggggggccatgacgtgtcttcaatttgttcgtctgtgaccatcttggcactctggccgtttacagaggcgaccgatatggtgatagccgatggattatgttccgatggcgtcttcaacgtcggccctgacccgattatcctcgggcggccagtggcttttcgggtccctccctgtggctgcccttaccactggttttggaccagcctcgcctgtttagtaggtttggggcagcgcaaacgtccctcaatcctgaggtgccatgtgtccctttttgtcatgcgctttaatcattacttgggtgcagttatgacgtaaccgccgctcccacgtccttcaatgtgtcagttttttgccttcaatttgaatttcgacggtttccctttttcgtattccacttatccgtctcttcagtcttctcatttctctttgctcaccaactctctgctttcttctccttggattccctttgggcgcctgcattcttctcccggtggtcacttgtgtctccttcccccttatcttgctctccaggtaactttcctccctgctcctttcgttttgctttttccttgccccacactggcttcttctccatcttcccttttctcctctggtattgccattttactttttgtctagtcctctggttttgcttcctgtagaggcccttcttgcctttcttttgcttccaccatgaggtatacaccggaggaagaggcggagatccgccgtttgtaccccccacgcgttgtcttctggctttttgggctccctcttcctgacgaggaaaaggacagggctttccttcgggtgccctccggtttgggtgcccctagtactcctagaatttcagtccctttaacccctaggcctcctagtgtaggcgtttctagggcattttctcaagggttttcgaggtcttttccgcgttctggcctcgcgcgccctgtgccgcgggtgggggtggcccctaggctccctgcctctcctcctgttaggcccaagcctgtcctagaggtgcctccccaattcgagattcgctacgagccctgctctaagtgcttggatgaattcctctacctttccagcagggacctggataaacaagccgaggacctattagataagtgtcggcataatcctgttagggtgcccaaatctctaaggggggcagctctggcttcggttatccatccatcggcgtcggcgtcggttcaggctttgcctcttgcttcgcccttgccggtgcgtcctccaggtaccttttctaactgatttctcttttcttttattaggtatccatgggttctcgtgtcggtgctagcgactccacgcctggggcccgtcctgcgcctttggccttgtttgatgaattcccatgggtcgcccgtgaggttctggagtattcgtcggtattgtcttctgaggatcttacccggttgcctgtcgaagcttctgaggagtttcatgttcgcctggctgggtcgggtgttcctgtttgcgtttcccaaagggataacgaacctcctttcttttcattttacagtgaggtgattactagggtagggattcggtttcccctgtccgattttcagatgcaagttttgaatcacttgcacgtttctcctacccagcttcatcccaacagctgggccttcattctcgcttttgagacactttgccatcaacttagtgtctcttgcacctgccccttgttcttttatttcttctcagtccaagctagtcgttcaggaaaggacgccgctgaccgaaagggatgggtgtcgttccgtggtcgcaatgacaccggctctgaccgtcggttgttctctctattttcagactcctttaaacgcttcaaggataaattctttttggttgtcgccaatcctggccggtgtcccttctttttgggcgattcttccgcgcccaagtttcctttatcctggtcttttgttcattatgaattcccaccttcttcctatcggaccaaccgggctcagttgtccgagtcagagcttgtgtcggtggcccagctattgtcatgtaaaagttccgggaacctagcaccgatagcctcctacattcagaagggttagttgcatgattttatcgactgttgtcttttctttcttcttttctgatggatgtttactttgcagctattgatatgggttccgatgctatcccccgccatcttgccgccctgaaatccaacaagaggcgtcgcttggccgatggccgtggtaaaaacgcggaccctgcccctactccggtcgctgccgcctctgggccgacccctactgatgccgggccgacccttgtccctgtggctccgactaccggcgtggtcccaagtccccccggctcttcaccgcctgttaccatcgacatccctgaaagtccggtgggtacttctgaggctttggctgctgatggccccccatccgttgaggccgaggccgccatcaatcatgccgaggcctccggtccaggttcctcgtcggccgctctcgtttctattgccgctgccgagtcgtcgggtgactatgttcgtcttcctcctcgggctctctggaaccagggtatgactcaagacctctttgaggttcttcgggcgccgaagaaattttccgatgtcatcgccttttccgattctgagctggaggagctgaacactctgcagtcagcttgctttaaaacgggatctctccttgggagtctctcttctctaaacctcaaggcctccaagtgggcatctcgggccgaaaccgctgaagccgaggccgaggcgctccgccgggaattggagtcggcccgcaccgaggtgattgagtcggctgaggctttgaaggccgctagggtcgaggcttgggaagctactgcgtcggccacccgattgacttcggagcttcaggggtctaaggagttagttgctaagctgacggccgactctgagaccgcccatgagacagtggccaagctgacggccgaattggacatccatcggaccaaggtgaaagctttggaacgggaggctaagactgccaaggccgctgccagccactcggagggtttgttaaagacgcttcggaagagctatgccacgtgcaaatccagtcgcgacgagctgcttgagtttaatgccaagaagattcgtgattgcgaggaagtctccaaggagctttccttcgtccaaggcgagctggagagggcctccgagtcttctttctacaataccctgagccagctgcacttcctgaatcctggagtgaagctgaacaccgagggtatgcaccatcgggcttatgtcagcgatggccgactcctcatgctttctgatagcgatggggatgagggtgtttctgatggggctcttgacggtggtgctccttccggcgacgccccaggtactgacgctcccgccgatgatgctcctccagctggggaaggtgcttgaagggccggtatgccggttttccttgtaaatttctaacaatttgaacgcttgacatttatatgctagttatttatttgtttggctttacgtccttccatggtgttattctgattgaggtatctcctgttgatcggtatactgaggctccaacggcctattttcccaatccgtcgttttgatttggggaatccgattgggaagtcacttactttcggcaaatttcgttaaggctccaacggccgtatatcttaatctgcctttttcgacctttaaggttccgattaggattttacccagtttcgtacgtaggtttcgataaggcccccaatcggccgaatgtcctaatccgtcgtcttcgacctttaggtgtcgtacgtaggtttcgataaggcccccaatcggccgaatgtcctaatccgtcatcttcgacttttaggactccgattgggagttaacccaacttcgtacgttatgcttaggccctcaatcggccaaatgtcctaatccgtcatttccgacttttaggataccgattagtggccttctttttgttaatcggtgtattaaggctccaacggcctattttcccaatccgtcgttttgatttggggaatccgattgggaagtcacttactttcggcaaatttcgttaaggctccaacggccgtatatcttaatctgcctttttcgacctttaaggttccgattaggattttacccagtttcgtacgtaggtttcgataaggcccccaatcggccgaatgtcctaatccgtcgtcttcgacctttaggtgtcgtacgtaggtttcgataaggcccccaatcggccgaatgtcctaatccgtcatcttcgacttttaggactccgattgggagttaacccaacttcgtacgttatgcttaggccctcaatcggccaaatgtcctaatccgtcatttccgacttttaggataccgattagtggccttctcctgttaatcggtgtattaaggctccgacggcctattttcccaatccgtccttttgacttttgggaatccgattaggaggttatttattttcgtgtaaaataaagacaatcgaaaataaaggttaatcgaatccacttgggcatatataactgaattccttatgattttattcatattcgaaacaagatttgcatgacctattggctcgacgtttcccgggttgtacttccccggatcggccaatgaggttcatgatacatctgttaacattacttggcatataagccgtaaataagaactcgccgcccatgatcccgatgacaggctgaagtcctgctaaagggaaacacgtgggctagctgtagtatatcttgagcttgtcggcgttccacgttcgtcggatcggttctccctttagtgtttctagactgtaggccccttgcccgatgttcttgttaattcggtagggtccttcccaatttgctgctaatttgccttctctggcgttcctgtttccgatgtccgctcgtcggagcaccaggtcgccttcttcaaacaaccgtgccttgaccttcctgttgaaccttgtcgccaccctgtttttgttgtgtagatctcggctgtgggccgtctctcggatttcttctatcatgtccaactcggctgctagtgccccttcattatccgcttgttccttattctgctttctccaggacggctggccgatctccacgggtatcatcgcttcacacccgtaggtcattctgaatggggtttcctgtgtagatgtttgtaccgttgtcctgtaggcccacaagacgtagtatagctgttctacccagtttgatcctgcttcatgcattcttttctttagaccgtccaaaattaccttgttggccgcctcggcttggccgttggactgtgggtgttcgacggacgcgaagtgatgtttgatctgtaggcctgctgtcatcgccctgaacttcccgtcggtgaactgggtcccattatccgtcacgatctccgccggtatgccgaatcttgagattatgtttcgctctaagaatttctgaacgcgagctgaggtaattgaagagaggggttctgcttcgatccatttggtgaaatagtccacggctacgatcagccacctcatttgtccttctgtagccttgaacggtcctaataggtccatgccccatttgtggaatggccacggggcggtaattaagtttagttctgatgggggaatctggatcaccttggcgtgtttctggcagctgtcgcatttcctcacatggttctccgcgtctgccttcatcgtcggccaaaagtatcctgctcgtatagctttcaatgccaacgctcttgcccccatgtgctggccgttgataccttcgtgtatttcggtcaggacataaccgactcggtcggattttaaacatagtaatagcggggtgtggaggcctcgccgatataactcaccattcactattacatatgatgcagcgttccttaccagcttcttcgcctccgtttcgccgtccggtactatcccatgctccagatagccgatcaggggctgcctccaatcctcgtcgcctgagatgatcataacgcacgctggccgggatatctctcgctgaatgaccgatctgtggttggcggttcctttggtgctggccagcttggatagaatgtcggccctggcgttttcttctcttgggatatgggcgactatcacctcgtcaaactctgccatgacttctttgaccttaaccaagtatttggccagcaaaggtcctttggtctggtatttaccctcaatctgtgcggcgacaagctgagaatcggtaaagacgttgaccctggtggctccctgttcttttgctagggttagaccggcgaccagtgcttcgtattccgcctgattgttggaggtttggaagttgagttgcagcgattgttccagggatattccttctggattttccacgatgatcccggccccgcttcctttggcgttggacgatccgtcgacgtatactttccacatttggtccggtggatcggtcgatgttggtgttagttccatgatgaaatcggccaaggcttgagacttgatggcctggcgtgcctcgtagtggatgtcgtattcgcttaattggatcgcccaattcatcatccttcccgctaaatctggtttatgtaagacttgtcggatcggctggtttgttcggataactatcgtatgactttggaaatatgggcggagccgtttagccgcagttagcagggcaaaggctaccttctctagcttctggtatctgagctctgcatcttttaagacccggctgatgaagtatatcggatactgggtttttccttcctctctaaccagtgctgcgctgatggcctcgtttccgaccgataagtacaacatgagggtttcgcccgggactggcttggatagtactgggggagcagataagcatgctttgatcttccggagggcttcttcacacatcggattccgtccgatcgttgcttctttttttagcagcttgaagaaaggtagggccttttctgccgatttgggcaaaaatcgggtaagggcggccattcttccggtcagctgctgtacttcctttttgctggtcggcagccgcatgcctagaatggctttgcatttgtctgggtttgcttctatccctcggtgggtgagcataaaccccaagaacttccctgctttgaccccaaacgcgcactttaacgggttgaggcgtatgccgtgctgtctgagtttttggaatgtttcctgcagatcttgaacgtgatccccggctgccgatgtcttagtgatcatatcgtcgatatatacttcgatattccgtccgatttggtcggagaagaccttattcatcattcgttggtatgtagcccctgcgttttttaagccgaatggcatgacctcgtaacagtaatttgcattgatccccctgaacgcggtactttctctgtcggctgggtgcatggggatctgattatagccggagtaagcatccatgaacgacagccaaaggtatccggccgagttgtccaccaattgatcgatgttgggcatcggatatgaatcctttggacaaactttgttcaggtctgtgtagtcgacgcatactctccacttcccattggatttcttcaccatgacgacattggagagccaggtcgtgtactggatttcccttataaagccggcttcgagtagctcgtcgatatgtttctccaaggcctgcttcctatctgggccgagcttcctactcttctgctctaccggcctggatcccgggtgtatggccagcttgtggcagcaaaaggttgggctgatccctggaacctgcgaggctttccaagcgaaaatgtcttggttttccttcaagcatcggactagccgttctctgaacgcggaatccccctggttgcctagttttgtaatctgttcaggatgtgggccgatttggacgtcctctagctcgtcggccggctccggtctccaatcttcggtgtctcgcaaatcgagctcgatcatgttgactggtcttttggtgtcgcctttcatcggctcctctagccgaaggcatggtggatgttggttggttcgtgattctcttactgtgttgtaagagcactgccgtgactctttctggtccccgttgatagtaatgaccttgccgtgatggccgatcatcttcatcttctggtgtttggtggataccatgatatcccatttgtgcagcgtcggtcttcccaagatgatattatattgggacgggaaatcggctaccgtgaaggtcactttgtccgatctgaacccatctttcgttcccagggtgagctgaaggtcgattactcccttcagggtagtggctgagccgttgaatccatagagcatggtctgacagggctttaagtcctcgtctcttaggttcatcctcctgaacgcatctaggctgatgatgttggccgagctgccgttatcgacgtagattcttttgactctgaagttggccacggttccggttatgaccaagccgtcctcgtgtcctggcatcacaccttccatgtcttcgtcggtaaaatatattagcggggcttcgggtttcttggtttcctccttctgtcttcctttgaatcgcggtttctccctcaccgccatcacttccctcaagtatctcttcctttggttggccgaatcgcctcctacgcctggtcctccggtgatgacgttgcattcgaattccggctcagggaactcctctcttctgctcttcttatcttgcttgttttccggtgccgctttcctcttattttgccttccctgtgtctggatgacgtattggcgtagcttgccctcacgtacgaatttttctatggcatccctcagctcccaacattgatcggtggtgtgtccggggccgttgtgaaaatcgcagtatcgggagtagtccaatccttccctcttcagtaatggtgggggtcggtcgactttcctcatgtcggtgaacgccacttcctgccatatctgcccccttggggccgttagtggtgtgtatttatcatacttcaactcatacctgccggttctaggtggtggatcggcattcgatcgtacttgtcgatgtgtagggacggattgccgactatgttgtcccatcggctgcctttcgtgtcgtcggcccctgggcgatgggagtctttttccctcctttggccctgagttgactatctccatctgttctaactcgagatacttcttggaccgcattctgaactcgttcagggacttaactgggtccttgtatattgacttggcgaagcgggatccgccgttgagacctgcggagatcagatggacatgtactttttcttctaacccttgaacctgtagcgctgcttccttgaatcggtccaaataactctgcaatgtctcgcccgccgcttgtctgatctttcctaaggcgaactgcgatttcggctgtcttttgctcgtcgcaaagttcagcaggaacttctgcccaaaatcttcaaagttatgaatagaacgtggaggtaatgagtgcaaccatacctgggccgctcctgttaacgtggtagcgaagattctcgatatgatcggctcgtcgatgcccctgacgcacatctgcatatcgaactcgtcgatgtgtatttgtgggtcttggctcccatcatactttgacaagaatgatccgtcgaaatcttccaggtattgggcgtcgactatgtggtcggcaaatgggctgttgttctgatggcctcggcggtatttcctctggtaggttcctctggtcggtcccgtccttgcctgcttgtccgtcaccgggtttggtgcaacgtccgagtgtatcagacgcgcctccaagggcgttttttcccgttctgccctgtcctcatttctcgttccgacggggattagcggtactgacctcggcgctccgtgcgacccatggatgtcctggctgtttgttttgttggtatcctggcgtcgcacctcctccctctgtctgtagtccctttcctcgaactgggtggtgatgcgttggagatcctcctgtcgctggagttcgtatcgtttctccaaattctccattctggtaagtagggtctggagagcgctttgtatgaaacgctgggaagcgtcatgctgaacttcttggagtgcaccttctgggggtggcatgtctggccccctgggggatgaatccgtgtgtgaaagggcattttccaccagcacgttttctcgtcgatcccccctgggtggttctccattcctttccgcctggtgtctccttgtgttagccattgatgataggtgggaatcgaagtttatcgtttcccacagacggcgccaatgttctgttatgtgataacagagttgtccggtggtatcaccggtggtgtttgtatgtaggacctgactcttcccggttagtctatggtgatcagaccaacgacagaagacgagatcacggacacgggagcaatgggggtgctgtgtgtgccgtgtgaaattgagagaggagggccagagtccattatgcgtacctttcaccgtcgagtgtttctgccttataacctttcgtccaggccggaaatgaggcattctgtctccgggattgtagccgtcgagtcctctccccttgtgcctgcaacgaggatcacgggtcatcggccggtaactgctcctgcgtcatcgaggggaatccctgattgcgcgggttcattaacgaggaggatatgggagcatatccgtaacaaaaataaaaccagcaaatgggtaacaatatcaatggtggtcagcctagatccatcttgctgttgcctgagaatccattgatacaatttctcctgtgaagaaatggaagcagcgttattcacataaccaaatcctcaacagcgagcaaagttcaaacacatcaaattgggaaatttaaacagcggtgaagtcacttcagaaacaaattactatgaattagtaaaaccagagactgacggaaaacaaaatctgaaatcaattattcacaataaccctaaaaccgtaaacatcaattgaataaaaaaggagcgtgctttcgttcaaggtgggtgcgtgtgcatatttgcagtttaattaattattttttaaacgaaacgacggaagagattacaagagcgtgtcgttcaccagcctggaatgaaagtttttgttggttcatggcgtgggtgtagagatgagagagggagttggcggtgctgcagaaagtcgagtacatcgttcgatccacttcgtcaaggcgcgtggccaccgaccttcgcttcttcgccatcccaatggcggatttagagtaaggaaggacactataaaatgtgtgttagagagaggaaaaacaaacaaaccaaagggaacgcgatatgatatacttctactacgaatgaatgaacgaacaaaggaatttacttacgctgtacagagacgatacaagtggcgtccacgtggcgcctcttgccgcttttctcttctacttgctcttttttcgctctcaaaatccaaactataattgcactgcaccctgcaaaaattgaaactttacgggcttgtttggtatggagtttttttctctcgggtcaaatgtgaaagcttattctagtcaacttgatttgtgaataatttaatgataattttataatttaatattaaatttttatctttcagaataattaatttattattatctcacatttacatagatcaaaatgaatatttattcgtaagtaaaaatgattttattttaaaattaagtttgactaaaaataaaaataatacattatattctattgaaaagtttacattaatttttatagcaatttttttagaataaaaaatagtcaaacattaatttattttatacaataaatttggttaataattatttaaatatacatttagtcaattttgattgattgtcatttataataataattataagtcatttgactttttttaatgaaattttgacttttaactatatatagatataatcatttaattggttgatgatatattcattttgataaacatggctcaaaaaaatattgtttatcaatgtgatcaaaattaggaaattaataagatcaatgaatttaatttggatcttgaaaaaaatagcaatttaagtattaaattttaaaaataataataattttttcattaagaatatacttattattattattagtgccaaaaatcacttttacctatatatagttgagtataatttattttaaaagatgtaactattattagaagctaaaataaaatgatgcagtgattataataaaagataaaaacatccagaataaatatgataccaaatgaaatttttctctttataatacttatatattattactattattattataataacagtttgaatcttcaccataaatataatatttgtcatcttttattataatcattgtcttgatacaaagtataaaaccattcatagtatattttttaagttagtaaatgatttgtcacgttaaggaaatatttgtcgatattattttagaagaaataagtacttatttttaaaaattaattatttttcaaagtaaagtgaaatacagtaatacacgttgagatatttataaatgaaagtattttttagagagaaaaaagtaagataataatcataatttaattaaaataataattatatttcttggttaaaatgttgattgatcttattatttcaagtctttatgtgtttatgtatttgagcatgaagattgcatatcttttcggtcaaatgttcatcattcttattactttaaatctcgttgtacttacttgtttgaagttgaaagattatgtacccttccaattcttgttagattgaccaacctaagactcattgtctcatatacctaacaatttgacccaaatacaatgttattataatgttattatatgactcacactagacctaaaaagcatgacacatcacactttcaccattaaatattattgaattaggttttttcattgaaagccaccatctaactgcattaaaagtaatcaaggataataattataaaatttttattatttttatattatatatttattgttttattatcatatattatgttatattaatatacatttgatttatctctcaaaaaatatagattttattttttcaatatgttttgaagattcatttcaatattatcactctcaagtgagaaatgaatttaatattaacagaactattatgttatggttttaattttttacaccacaagtatttgttaatttaactaattgtagcaaataaaattcaagttactgtattatattattatatacataaaataaaaaatacaataatgaaattattttttaacatttaaatcatttatttttttattaataagaattttatttattttaattttaaaatatgtttctaataataataattaaaaataaggatatttaaatatttttaggaaaatttaagaaatatgtaaaagttatttaaagtttattatgtaatttttaaaaatcttaattacttaacaaaaatgtctcatgttatattagaaaaaaattattatttaaaaagatataaaataatttttataaaacctctttcaaataaaaaattgttttatactgataggaaaaataaatatttattcatatgtctgtataaatattgtattaacagtactaaaaaatgatctttgtggaacttctcttttaaaaaaatgatttcacaataacgaatatattcattgaattataaaatacaaaaaaaaaaagtatttttaacctaacgttgattttaaacaacaaaaagtaaaaaaaaaaaaaaaaaaaaagcaaaaaatcaagggaagtaaaatgaagaaataacagggtgtcgggttcgggcacccattttggcatggccgcatgggttccgtttgaggaaaataaattctaaaataatgtggaggggtttgggaaaaatagggcacaacacaacacaaaagtcacaataacaaatctgggtatagtggagtagggtttttttgcgtttgagagaagcatgagcaggagtttgggaattccggtgaagctgctccacgaggcttcagggcacgtggtgacggtggagctcaagagcggagaactctacagaggcagcatgatcgagtgcgaggacaactggaactgtcaactcgagagcatcacctacactgccaaggttctcttctttcttaccctactttttattttgttttattttatttttacgccaaatatggtttaattcacgattgtactgcgaaacatgtcgtcaatcgagggtttaaggttaggaaatgcaagtttaaattgggtattgttaggtccaggaatttgaggtaagttagcgtgtgtttgggacagcggcaaaacatgtataattaaatattgctagaatatattgcaatcagaatcagtttttatttgggtaaatttgctgaaaagcaggtttaagataattaatttcacttggatacaaaaaaaaaaaaaaaaaagcttttgggaaaagaagttgttggaaaataatcgtaagtttcaactttttagaaaaatgtaatgacagtcttatgccttagttgctgagtttctttgaagttaagagaggactgtgcacaagtggagattggggcatggatgttgggaatgaataattatagaataagggtgtaaggcttagaccatttgtgtatgcaagatccattggaccttggggggcaacatctgctatatatatgttttcaacatctgctatatatatgttttactatgtctgttctttggtctctcttacggggattacttggatttaggtttcaggagttattagtttgggaaatgtccaagtgttaaccttggagtgatgcactttctactgttccgttttgaactgtttttggtgggatataatgactctggatataggagaagcttgtgaaattgtgtttttgttaaattttagatgttgtagagatgtttagtatctccaacttcaagtatatttgttaagacatgcaggtaattcatattagttgctgatattggctaaattcttttcaggatggcaaaacatcgcaacttgagcatgtgtttattcgaggcagcaaagtcaggtatgaatcacatgtttctcggtgactttttaattttatatacaatcttgtaaggttttatacctcaatcatgtgttgtttggtaagtttaaatttttatattctgaataaggttatgtttgtagattgcattctgtaaggacagtgattttgacatgataagaatttgacaggtttatggtcatcccagacatgctgaagaatgctcctatgtttaagcgtttggatgcaagaatcaaggtaccttcttatttccaagttattaagtactccatattcgtttttttgtgtgcttttgaattttatgctttctgaacctcttgaagggcaagggtgcatcacttggtgttggtaggggcagagcagttgcaatgcgagcaaaggtacttatctcccctttttcttaattattagagatagatttagccttaaaaaattgctttttcaatatcctgctagttaaggacctaccctgtggcatgtataactccatatattgcttctgtaggctcaagctgctgggcgtggagctgcacctggaaggggtgtaccaccagtgcggaggtgatcaccattcatatattctgtattctccctgtctgttggacatgtttatgtgagaaagaaattcgaacagaaactgcgtatcaagactttacagattactctttatggatagtacttgatcccaaatttgttctcatcacctctagtattctgatctgcactgtgtactacttggctaggaggattttctgtaaggaatatttgttaaaatggtacaagatagtatcagttacgtaggggcagtttgacaactgttaatgctggtttagaactgttcgtggtaattatgactcgtttgaaactgtggagattttgtgtttgtttttaacaactgttttgtaaatagttttgaaaaaccatttttaagaaaagaaaaaagacaatctggttgataacagttttcacttgcactccttctccacacatccaaacctctattgatctctcctggtcactgcactatcatgtcttggacgatcaatatcgaaccagtaagctccaatatgccgaactagtaattgccaaatatcacgccaatagccaatcaccttcatactcgcccgttggacccttttgtgcttaattaatcatcaatgtattgcctcgttttgaattatgcttggtttttgatatatatcggatttttgattaaaaaattcttcgtatttgttttttgatatttgaaaagttttgttttaaggttttattgttagttaattgatgttatatttattaaaatttgataacgtgatttgtaactattcaaaatcttaattttaattttaatattttttaataaattatagtcaaaataatattagaatcattcaattaaataaccatattgtacaataggacttggtttaagtggtgatatacttgagcctcttaagcaagtgcttagaggtttcaatcttgatattgtgtgtggagaaaatctagttaggaaaagacaattcagctttgagtgctttcaattttggatatttaaaggtgattagtcttgataaatgataaaaaatctaatgaatgaaaaaaaaaaaaaaaaacttgtcttctacttctgtattgctgtttgataaagtgtagaaataaagttgtgaatacgtgtattaaataaaatgcctattattttaaaatttatagttatgttcttaaaaaataatattgttaaaactcagttaaatataaaatataatgtaaaataaaaaaagacttcaaaaccacaaataaatcagtatttcaaaatgatatattttatcctacaataatatagtttttaaaatgacacttcaatgcttcaaactttaatattttatcttacgtacataatttaaatttaattgagaaaacaccattcaattttacacataaaataaactgaatcagaatattctttataataggcatttctcatcttcttctccagggtttaacctatgcattgcctgatgcattaaaaatcaaaaagaaaatcaagatgatcacatgattgatacattgtaacttctctttttaacctgtctgaaaatttcttttcaaccatcagaaaacccactttgatttgagaaaaaggaaataaaaggacagaagaattcatcgacgctaataaacacatcatggacaaattcaaaaggcatagaaggaaaatgacctaaaagctgtccttactccttatatggcactgaccaacgccccaacctaacaccagaaataagagagagaagtttttaatttaaactgattaatttagatacttatttgcgtttctgatacgattaatattctttggtttgttcgtaaagaaagatgaattatttaaccacctctctgaatcacaagattaatttcatatatatttttgttagaaggttacatatatgagacaattttatttgacttgactaaaattaatgtggacaataaaattcgctcttcaagtattaacataattataaaatttgaatctgacatcattattcaataatggttaagttaaaaattaaaacaatctcgaatcaattaattagtcgaactcaaaaaaggaaaaagaaattttgatgagctattttcttttagtttgacagcaacaaaatcagattctatccattaataaagaattgtgaataaaatgagaaattacatgtaagatatttttggtaaattagtttgtttcctaacaaattaaattgtgtaggagggatcgatacaatctcataacatctctaatttgattaatgatcaatgcgtatactctgacaaatccctaatcagattttacgaagagtgctaataatttatttattaatatacacttttaacattttttttttataattaatgtataaaatgtgaaacccaaaaaaattgatttttttaagcacttccttattttttcttatacacttcctccttttctttttttgtttctttctttccgcactacccatcagtgatgtctctcctaaacgtgcataaaaacaaagacagaaaatagaataataataatttattattataatctctcttaaaataaaacccccatccagcaagcacagccacaattatttgtctgacaggccataaccttaattttaaggtaacaataaactaccagcagcagcgatggacatgtaacatgcacatacgtagtactatttttgatttcattgccagaatgattaaaatatcaaactttgtgttgctaccacgtacaatgcaacgttagtggtggtgtgcacaaaattgaccattgttctttatgacattgcgtttacgctgctgttccagcttccttccctaactcaacctcactgagtgaaaaaaaaagacgttacaaaagcgcacacgatttttcaagagccaaacagagtgccctaaattcaagcgcaacgagtcaaacaaacaaagagagaagaaaaagaagcaaagtacaaaaccaccgaactcggctctttgtagtttttctctctttatataaacttgtcttctctcataaactcccctcactttttcttcctcctctcctctcaccacctacgtcgtttcgggtgagtaccagcttctccttttggcaattgtcgtcttcggtgattcctatagtttcttcattgaattcggtttagcgtgactttttcttcaagttattattattattattatttcatttttggtgttaattgcggttgatattattgtgtgttgggaattattgcagtttcatgattctgttcctcggaattggactgtattgtgatttgctatgaatagaaaggagtaatggatctaatgaggattttgctattcggctttgatttcattttttacaactattatttggtttctttgtctctttgtgtgtgtgtgttttaagttattacttgaattctgtgtaagtttgagaatgttggattttatggcaaactgagcttcaaggttcattcccggtccttgtaatctacatcagctttctctctctctctctctctctctgtgttggttttatacctagaatcaattgttttgttcatagacttggtctgacactactcaaaaatcaatttctcgttcaaattctttgaagtgttgaaaattatttccgaaataaatgtttttaagaaccaaaaaaacagaagcaactgggaaatattttctcatcttcttctttgagtattctgtttaagtgtgcacaagagacagatttttagaaaacacaaatgtgctcagggaacaaacaatttcaaatacgccaaggacacaaacaaattttagaaaatagaaaactgtttttgaaaataataaacaaagccagcctaaaattagacattgtttctccttttctttatttattttttaaatagtatcagtatgggagtttaacttctttcgttggaatctgtgctgcttctgatgacatgtgttcgcatgcagataaagccattgaacatgtcttcagcaaccaagggtgatagaaagactgcacttgatgtggcatcatggatgttcaatatagtcacatctgtgggaataatccttgtgaataaagccctcatggctacatatggtttcagctttggtatacagtttcttgaccctttcccatcctagataatttactccacttccattttattttaaatgtgcaaatgctcactgcttgcaatgcattcgttgagtctatcttttagtgctcgtgtgcagcataagcttggtcttaggatttaaaacaaaagtatttaatatattaagggaataagggtggtagttgaattggggtcgagtatggtatcagcgatgttatttatagacaacagtactacctatgatagaaatagggataaaaagaaaaaaatgaggaagggtaatgatctatgttatgatttcagatgatatgctgatgctgtacggtcctcacacttttttgtatttgcgactcacagataaagcataagtagagctactttggagtttgaataaatttatcaacaagtacttataagctgaaaaagctaatccgaactggaccctaaaccaattactatattcacttaaattgatggtattaaaaaagctaccagtttttctaaacttcagagggcacaggaagaagacacttatagccaaaaatatttattgttgtgttcaagataggcatacaaagttttcacccggaaaactattttaaacatcttatttgcaagactttagtattcggattgattagtattattggttgtatatatcccagagttacgataggcaagcgccgagaataacactccataattgatttgagtctcttgtataactagttcaccaaagaagaatgtaattttatggtttctctgattccaggtaatagattacttttgagctcctacactactcctgagttctaacattgtaaatcataactattatgcagctacaacgttaactggtctgcattttgccacaacaaccttgctgacagtctttcttaagtggctgggatatgtccaaacctctcaccttcccttacctgatctcatcaaatttgtcttatttgcaaatttctctattgtcggcatgaatgtgagtttgatgtggaattctgtcggtttctatcaggtaactagatttaaaataaaataaaattgaaagtataaaattttaacactgccagtgacaaagataggcatttatagtgtttccttcctttgaaatgaaaacttcagattgctaagctgagtatgattccagtatcttgtttcctggaagttatcttggacaacgtgcggtattcaagggacacaaaaattagcatttctctagttctccttggggttgctgtatgtacagtcactgacgtgagtgtcaatgctaagggttttatagctgctgcagtggcagtttggagcacctcactacagcagtatgtaagtaacatactactaaaactatctatatccactctcaatcttatttggtagattgcagtagatcaaaattgaatttattgtcataaaggtggttctagaattgatgaatgtgcactttcaggtgcaagaatgcttgttgctaatattcatgtatgttagaatttactcatctcatctaattatatatctaaaactgccaaaatgggaagcctgcaggctgcatttcagtaacttatgtcagatcattctgattctagtttctgctgttttatttgggtgtcatgacctagatttcttttagatgatattttacttctattttgtgcagtatgtgcattttcttcagaggaagtactctcttggatcgtttaacttgttgggccacactgcaccagtacaggcagcaagtttactactagtaggtccctttttggactattggctgacaaacaaacgagttgacgcctacaactatggtttcacatctactgtaagtttctctttgtggaattacatgctttatagacttttgccaaataccgtgaattttgccatttgctctgccaaactccagtgccaaatactacaattcattcatgtctttctctgtttctgattcactgtagcatatgtttagttcaactgtaattttccagtaccattatttagtatcaccatataaaagtcttgggcacatatctgttcctactcttccagaatgtttagagttgaaaatcaagatcctgaaaagtcacgtataattgtcttattttgctctagccttgcactgcttgaaacatttcctaatcctcaaaatttttaagcacatgacatgaaaattttcacccagcacttagatactgactgatagtcttctctttgcattattaacgagaccaatctagtcaatcaaaatataattgtcaacgtgtctatctatacaatgttgtaaaagacacattggcagatgcagaattatccatgatgtagttctactcttcatctgcataccggcaacatgcatagttgcatacaacactttttgtttttcggacctaaattcagctcttctttatattcatattcataaactttgtgctagcttgactttttgtctataggattaaaatcaaatttaactatattgagaaagacaaaaattatattttacccaacaaattatttattgaggaacacatttgccaaatccgacattttatctcccaaaaaagactgacattttcctaggaaaagaagaggcatttaatgttaagggtcctactaactagtgtcttaagggcactggttaaagtattcaaaatagaaagtttttattggaatttatgttggaaatgcactggaaatcattttctattttgaattccatatgcattggccttagcctaatgttaactttacaatagtactatattgaactaatctgcttcttctgtttgcagttgttcatcattatctcttgcaccatcgcagtagggacaaacctcagtcagttcatctgcattggcaggttcaccgctgtatctttccaagtccttggacacatgaagactattctggtactggcattaggattcgttttcttcggaaaagaaggtctcaatttacaagtcattctgggcatgaccattgccatagcgggaatgatatggtatggcaatgcatcttctaagccaggagggaaggaacgtcttagcttacccattaaccataccaccaacaagacacaagagtataatgtactaccagtgtcctctgaaacggatcaggaaatatagaagtttatgtaaataaagtggtgaatagcatgggaaaatcaggtgccctctaggacagctgattcattttctttataagaaggaatttcccaattactgatagatacatacgtggtcatatatctgtgctttgtgttacggagttgagggaggacacatcgaatggtttcaacttccgttaaagataaaaaaaaaaaaaaagaatttggatattttcacacagcctctctctctgcttacttacagggtttacaaaactgaaaatttgtgtcctacgcaatgaaaaatgacttattgtcacagtttttagaaaaatgaaaattaatttctagtccttcagataatttgcataaaagttactataaatcacgttactttaaaactgattttaatcaaaataaatttccttattaaaaatcaagtttgccgacacttactcatgcatatactaaacttactttcaagttttaaatacaaatgacaatagatagaatctgattaggatattatagtatcgattttcatatctatattttaaagagatgaaagatcacaacgaaataaaagtgagaactaaagtattagttttcttactgtaaaaaaaatattagttttctaaacaatttattttagaagaagaattgaattttaattatttttgtaaaatatatttttagtgtaagtagattattttaatattttacaaattactcatggatggaaaaaatcatttttattttaatttatttttagtataaattttaatcttgagattgggaatttaaaataaataggtatttttatataaaaaaaagtaaataaatttttttataagaagtgattcacttgaaatatgttagcaattaaatgtgaatccccctttttttgcttaatttttttataataaaaagttaattaaaaattgatagataaatctaaaataaacagttttttggtggaaaaaaataaacagttgattaaagatgaattctgttatttattattcttaagatgatgattaaaaattaataattttttaaaaacaacataatatcattaaacattatgtttttttcaataaaacttttcaattttaatttcttaattgctaactttcaaaaaaaatgtacttaaatttcttcttatttcaatttattaatttaaattgatgaacgttgtaacgtttttcttctccaaagacaaattaggttttcaaaacaaatcagaaaaccccaatctatcgtgtcttggctcttcttcaccttcagtcttcactcacgcgcgccatcttttcagtcgccaccactccacgcccacgtgagtttcccaatctcattcctctcgaatatgattaatcccttatgttgctattgttactcttagattcgcatgaaattgcgttttcaaatttcaactggtaggttttgttgctatggatctaacttgggtttatttagtgccacgactttcgtttccttgtctttttgtcactgaattagttaattggacttttttcaccaatgatgcgtgtcgagagtagcgttcttcttgctcattcgatgttgagctttctcagaaacatgattattctcacctttgtgggagtgaaagagaaagaaaaagagtatcacgagtcatactgtcatagagagatatttcatttaattttttaatatgtttatatatctctttgtttaaaaaatggatggaatttggaaaatagttactcagagaaaaacaaagggaggtgaagtgtgtcaaatttatgacagagtggggtttactgtttctgagctgaaccacgaagagctaactgaattttaccagtaaaatatttatttattaattatgtgttaatctcgtgtatttatataaccaaggacaaaattccacacaagctaaacataagaaatttttaagatgaaaaacacagattttcttgatgaaactattttttttaattctagtatttatattgttaaattctgtggcatgggaaatgaagcctaatcaagtgctcattttatttggtgctgtttcattcaatttatgtgtataatagctactggagaatttttgttaatcctatctttctcccatggcaggctgagaaaaggaatatgggtgatcggcaagtagttgaccaacagcacacgggtgatccacaactgccatcttctcctccctcaaaggatgatatggtttcatgtgttatggctttggaggctgctttgcttccctgtttgccagccagagaacttcaagcaatagaccgttctccccacccctcacatcaaagtgggtaactgcaagtatttcaaattttgattttgcattttcaatactggctgctacgctctgctattcaagatcgataactatgcatcaaccatgagcactaaatggcctttgaaactttatttaattatccgacattctgatctcgtgtcaattaaagcttttaggaattacagtcagaggtttttcttcatgcatacatagtgcttaaattaacaataaaatggcttaggagatcaaggaaagatatgtctactactttatcttaacatttgaggaattgaatcaactggaaaagcatattcattttgttgataaaagttgatggaaattggaaaatagtgttactcagaaaaaaacagggaggtgaagtgtgtcaaattttatggggacatatcttctaaagtgtgttacattttatattaagcatattcatttaattcagttgttgatggattattcaatgtgcaagtatgtgcacattgattatctagggcaggaaggtggggtggggagggaagaagggtggtaaaatgttcatatagatgatcatgcagttgataagtaaattttaaagaaatatgtttacatcaataaccgttggtttgataattataatcttagaaacgagctcaataatcctagaaatgagtgaaaatgccataaactgatgtctgatctttggatgaagtttagctttaatctatgtccgtttttcataattccatatattattggggggcataggtgaaggttactaaagctcctatggattatggcagtcttcccatcttctggtttgaatgcaaagttggaactttttcatatataacatgtatcacaagaaccatagtgctgaagttattgaagttaataaaaaatgatcaggtcactgacaagaccatatttaagtttaacagcatttgcaagactaattaaggttcaattatgtccctgggctttaatttacagcaagaagggaaatctcttctttgctcaagtcctgtgttggaaactatatttgcaaaatggttttctcatctagcaatgcatggtaaatttaaccatgtatccaactgaactttcccgccttggtatttctttttttcagttgatgtggataggtatgcaagagactttatggaggctgccaagaagcttcagctttattttatcagcctgcaacgtgaggataagccaacaaaagttgaaatgcttagaaaggtatggcagttcattatgaaatgtttttaatcagttatggagactaatatatattttttcatctaaactaattctatttgtcttatttatgcaggagattgctctgatggaagaggaacttaacataaagaatgagctgataaaaaaacaagaaaatttaattcaggagtggaaaaaagagttgaaagatcagttggacaaacacaagattgagttggatagggtttagacgtttagtgtatgcttgtgctcctatgctctctacatatttaaagactcggtgccacatttgtggcatattttctttctcttcctctatagtctttattaattattattgctcatcccatagcatgaaatcatgaatccaaccacacttaactggctgcgaataggtgtgcgattagattgattttaagaatatatgatcattcaaaccaaattaattaaatttatttagtttaattaatttggttagttagctcattttatttttgaaataaattgaattaaatgtcattaagtttttatattttattttcaatttaaattaaatctattaaaatttacttcgctgtcagattatagttattttcaacttggtcacttttttattattattttggatttttcctttacttttgtatgtaactttggttatgcttactattcaaatttatcatattttaaacctagaaattaataagttgtaaagtttataattgtagaaaaatttatattagaagttaatttgaattgatttgatttggattttaaatcatatttcaaattggtttgatctggattaattgaagaaaaaatggaagttaaattaaattgactccattaaatatgattggtatgaaatttgggtcacaataaagttaaacccgagaaacctgtgaatattcaaacatgaactgttagactggatattcagaaattagctggctaaattagacgccaaaggtctattcatccatgatggattatcagaaaggtgaactgaaggaggttgcaaaagctatagccgaaaagcattgtcttagcttctgatattgtgacacactattaatttattctttgaaattgttggatgctaaattaatttttaaaacaatttaatttctaaaataatatatgaaaattgaagatggtcaatcaaattagttttgcaactatcactttcagttaattaataacgtcaaatacactaatatgatgcattgtttagctagtgttcatgagtcatgttagctcacacatggagggtttgtcgtacgaaataattattttagtctctaaattgaaaatcgtggattatgttgatccaattgtcattcctaagaaactaagtagtatgttaattgccctattgactccaacattgacccacgcgtgacagttgagtcacacagtattttttgttgttgtcttttacggtattcacatttctcctcctcttcttccttcaattcaaaaacatcccttaaactctagaattagcaaaatcaaagctataagagaaacaatatagaagtgatgataatgaacaacgtagggccaatcaagacaatagaaaaagacaagtgtgtcttaaagtgcatttgcaagctcaaatcaataactaaaaacaagatctgtaatttacaattttgttatggtagtttaagagcagttgtgcaatactctagcagtcagagaacctaaaaagaaccttttataagtacatatattctaaatatattaacactgtgaatatcattatatagtatattaatactagtatatttttatccaataaaataaacaattatttttaaaaaaattaaaatatgtaatttcatcatattatttgatgataataatatttatatcccttacatacttattcattaaaatttataaatatctgtacactgcaaaaatacgctaataataataacagataaatgacatagcagaccaacagaaggaaatgcagattttattgggcacggaaaataaaaagaccccaaactgaaaaattatactctcaataatcttttttttacgtcttcctacataataaatactttgttagttccttaattaataatttaagaaaatgattggatcgaaaaaaaatctcatgattacaattgtacataaaagaacagtagtattgagataagaagaagaaaagcgaaacaaaatatcagacgccaagaagaaagaaaagagaaattaaaaaaaaaaaaatcgcgcaaggcattaacatgcgcttttttatcatgatacgtgggtctgtgtccctctaatttcaagatccaccacattctcagtccttctctggtcgaaggtttgttctctccaataccgcaggtagtttcttcaatcatagtttgtcttcttctttttttgttaattttgctatgtatttatgtatttctgtcatttacatctgtgagtgtttctgttgataatttatttgagatatgtcatgttatgtttttttttcctattaaacttttttagctctgagctctggttaatttacgtagtttttttttttcttcctttgcaaactgttttggaattatgtgtgtatgaatgaattgaattgattttggggtagtttcggcttagtgaatgttaattctcaattttatactttgcaaactgtttttcctaaagtcgatttgaacattcgttttgtgatgttttggtttttgtcctaccgtttctgggtttgttaaaagtaaattttagatatggcttcactttaaactatttcttccctctacaaaattggaagttactgatattagttagaaaaataattaggaaacaacaaatatagctgcagccaatgctccaaaacatatttcaataaagtagtaaaatttttaggaaagaaataaaaacttatcttcttttaagaatagataaaaactggttttactacttttttgtgctgccttactctctcaagaggaaagatatatatagagcagaaaaacacaacgcaacaccagtcagacaaaaactgaaacaaccactgaggcactaacttgcaaatatacttgtaacgttaagaaaataataacagaacaataaaatctccttatagtgcaaaggcctataacgttaagaaaaacaaaataatttgactaagtaaaactaaaacttcctaaaagataggaatggaagaagatactggggtacttttagttttacggaaaaaaataatctgaaaacatatttgatctttaaaaaacgaagctaattaagaaatattttttttttaacttttaaattttaaattataataaaaatattttccaacatcttgcaatctatatttggttgaaattactatgtccatgtcattcaattatgctgaattctgcttaagtagttctcacaggtgtaatctaaatgcactatacaggaagcaaaatttaagctggtacagtttctttctataaagcagcatgtccctgggtacttccaaagcagtttttcaggttctgtccagggctgtgcctcaaactgggtataatgattctcttgtgaactcttcagatttagcattacattcccagtttcgagtaaaatgtatgaagaaaagatcttccaggcatagggatttcattgagtgttctagcatgcttcaaagtaggctaagaactcaacaatttcagtggatgggtgtcagtttccaaaactataagacctatagtcgtccatggttgcacacatgcaaatgccaacgggctgaaagtgtgagtgggataactacaggagatggaaatggatcgagacttgtgaatgatgttgaaacaacaaattcgttaagcaatgggatgagtgcaaagcatatcctagagtttgaagatgtccaagcccaacagttgaaacaggaaaaggaggttttggcatctaatgttacaaatggatctattaaaggcagctttaacacaattgacctcaactccatcgaggaagaagcatgggatctactaagggagtctgtagtttattattgtggcaatcccattggaactattgctgccaaggacccaaccagttccaatgttttgaattatgaccaggtctttattcgtgatttcattccttctggaattgccttcctattgaagggggagtatgatattgttcggaattttatcctttatacgcttcagttgcaggtaatgtcttggaatcttggtcttataacacagcatgtgccggtaacagcaaaatttgatacaacttggtcacttacatgccttatatatatatatatatatatatatatatatatatatatattttttttttttttcaattgattatttcgaagttttgttttgcctttacaaagttattcttattaatcagtcattactgttttcaatcctacaaatctaactctagctgtttctccattggcttgtaacttttttggtgaaaatactaattttcttttaagaaacatgctgaaaatgcttgggtttgacaattaatattaatgtgaattgtcacagatagaatgaggtaggaccatctgctgtacataattaatgaaaagggcatgaaattatacttttcattagaaatatttttttagcacttcttttgccttaactgtattataattactttgttgtttctaatatactgtcttgaacccacacatccatatttcagagctgggagaaaactatggattgccatagtccaggacaaggtttgatgcctgctagttttaaggttaggactgttcctttggacggtgatgattgtgcaacagaagaggttttggatcctgactttggagaggcagccattgggcgtgttgctccagttgattcaggtaaaataaataatcaaatcaatagaaatattttcttacatagccgaagagacttaccataactctccttggattgctgaacatatatgtgatctcaggattgtggtggattattttattacgggcatatggaaaatgctctggtgatctatctgttcaggagagagttgatgtgcaaacaggaattaagatgatcttgaagttgtgtcttgctgatggctttgacatgttcccaaccttattagtaactgatggttcttgcatgatagatcggaggatgggaattcatgggcatcctttggagattcaggtaaataagatttcctttctttcttcaattgtatgatgtttgtaaatatgtattttctaaggccaggaatgaaaattttactgtgtattcatgattatacatttgttcagataggagggaatgatgcatttgtgtgcaccattttggctagaagcaagatcaaattgagaacctgcattcctttaacgtgtgattgagttcttttcttttgtttttgggaagagggtagtggtattagtctattagatatttttttatgtatttaaaactcttttttaacagggttggaaaatttaaggtattttcaacttcattttgagtttgaattgattgaagaatgacattaaagtgctggctgaattcatatttgtaggaagcagcaacattcaactatctgatatacattagagttcataaaatcatcattttttggaaaggagtggtgataaataaactaaacaatatcaaaagctaatccatctgaatagtaaatattaaaatgatagcggacataaaaattaaagcaataaattatttaatttacaaaagggatgcatctctttccacagattaaggcttggctggttcatgagtagaggatccctgtggtcttttctattttgaacttttgatatatactcttcaataacagttgattggtacttgatacctaattctgtaagcttagaactaagcattctttccttatcttgactgcccttatggtagtcaagagaaatgaactcttgtaacggattatgggacatggaataaatgcatccatgtgcatgtggattgacaaaaatatgtgaaaaactgacacacgagtttgcacagaagttggactagacaaagctgtgtaatttcacctttctaacagttaattgactaacagttgtaaagccatcagacttctacacctacatctcattcactatgcatgcctttctcaaatgcttttgttcaagtctcatgagaatgttaacagaccgatattgttgctctgctgcatgttttaaatgcaacaatcttttgacaaaataaaattctcagttctggaaaatgagagaatcacgtgataatcacacacaattagagaaacttaaaattaaagatgaaattagtgttcaagtaatcttctctaacttgtattctcttttgctttttgttaatttttctgtttctaggcactgttttattctgccttactttgtgcacgtgagatgcttactccagaggatggatcagctgatcttatacgggcactgaacaatcgtctggtagctctatcatttcatattagagaatactattggattgatttgaaaaaattaaatgagatttaccgttacaagacagaggagtactcatatgatgcagttaataagttcaacatatacccagaccagatttctccttggttagtggaatggatgccaaacaaaggaggctatttaattggcaacctacaaccagctcacatggatttccgatttttttcactgggaaacttgtggtctgtcgtaaacagtttggccacagaggaacaatcacatgccatattggatcttattgaggccaaatggtcagatttggtggcagagatgccattcaagatttgttatcctgcacttgatggtcaggagtggcagttaatcacaggcagtgatcctaagaacacgtacagtatctaatttgctgtgtttgtgtttttctattatcttattatatttttcatcaaataatttttttatttgtttattttttggcaggccgtggtcctaccataatgcaggctcctggccaacactgctctggcaggttagttacagtgacaaattttggtacactcaagtctctctagtcaaagcggttttatttaaagcttttatcctctttttcacctttactattattatagaacttggtttctctaaagtgagtaatttactttagagtaaaataattaatatcagtctttaatgaggaaaacaatggtcaatattacatgtgttgaaatatcaacgattaagattactttacttttactcagttaagaggaaccaaattcattattataatatatcctgtgtacattttcttccatctagacatttaagtgaatgagctttgttgtcttttcttagcagtaaatgtcccgttgacttaatgtacatgtaaaatcctttttcttagtgtacctggtttctttattcaagtattgcaagttggaaatatcaggttcaagtttttaacatgaaatatgcctattgcagctcacggctgcatgcataaagatgaagagaacacatattgctgcaaaaacagttgagattgctgagagacgcatatcaagagacaggtggccagaatattacgacacgaaaagatctcgattcatcggaaagcaatctcgactatatcagacttggtcaatcgcaggataccttgttgcgaagctgctgcttgcagacccaagtaaagcaaacatactgatcactgaagaggattctgaacttgtgaatgccttgattagtgccaaccctagaggaaagcgagggcgcaaaaatttgaggcagacttacattgtatgagtcttcaattgcaattcatttggttcctttgggtcaaattcattattcttctgattattagcagcatgttattcttgccagatacggcaggaatatgcaaaaatatattgtagtttgggttggttgtgatgaaacaaaaatactactatgtatatatatgttaatgtaattgtgaaaagtgatgtcgatactcctggagtcctggtacaagaatgtaagtagcatacaaaatataaccgttaatcatagatgatgaggacttttatactagtaatttctagaggaaaaactagtttcccctgtttgcatcatagaataccatattccgtaaactgccatagtgaattaatttgaactggtaggaaaagtggagtggtaccaatagaattcaaggctagtgactcggagtattggaccgttgagtttgttaagataagtgatatatgctaattgcacccgtctaatcagagatatgccagctatcagtaagaaaaacacgaagagaaaggattggagtgaccttaggatggtttgttacatttttaaagaaaaatatacactatggtttttgttttttttttttttacaaaagtgcaggtgagttgaatttcgagatttatcaagactaggacgacctcaagatttaaaagtgtttatgaagatatcctcacatcatgataagtcatttattggagagtaaaatatacacaagggagtccctattatgaaatttaaggttttattaccatatattggtgaaataaatttgaatacaatctcttgaatgctttccaattaaaaggtcctattaatgattgtcctaagagcaattattaagatgtttttcatttgtttttattgtttaaattattattttggtttctttattttttttataatttgatatctttattattaaaatcttcgatgtggtcttctaatatgcaatgtgattggtcttctaattgcaaaattatatgcaatatgatcatttttagctattttcacattaacaatggtagcctagtctaatgaaaaatgaatatgtgactattacatagaaattaatcatcgttaataaaaaaataaatagaaagtgtcacatttatattatttttttgctggaaattacattgcatatattttaacaagtaaagtaccacattaaatattttagtaatagatggacgaagttgaacaaattaaaaaataaagataccaatagaacaatttagttttttttatttatttgttgtcaagagaaacatttattaataatcatgtgtctatttaaaaaatttaagataatattaattattattatttaagataataatattaactattgtttttatttttattaaatagtacatatattgtttacaaataaaaaatgaataatagtagatgtaatattaggaattttttttagaacagttatattaggaagttaaaattagttttaacaaaaatgattaaatggaaattttatattacatttcatataatttatgtattagacatgtagaaaaggaattaatccatggagtatttaatatgttcactcacttaaaaaaattattaattagattactttagaagtaaaaggttttaattaagatataattcattacattaaaaatactaacatcattttttatctttatttcttaatatcctaaaaaaaattacttttttttacaatgatggaatagagtttgaatctaagattccatacaagcaacacaaatcttcccaccactaaaccaattctagagagttcacatttttttatatttattttctacatttaacattatctcttttggtaacgctacaatcgtgaactttttgaatcggtgcaaatattcaatcttagacaattttctaattaagatgtcttcaaacattttaaatgttttgtacttgtgattattattttcttatgcatgtaattaacttttcatctattttaactctcattctttgttaaattttcaagatctaattcaattagttaaaagatgatataagttgttataaattctttgatatcgtttcaattttcattcattaaattcatttctccttcaatctatatcaaattatcaatatataaaggagatataattttgtgtaactgttttttctctccacattttttatgctattttatctttattcttaataatatttaaatagtaacaataattaatcttctttaattatgcatattaaaattaatccattaaccaaaattaggtaattacttttcacttttattagacaattttatctttaaaccatttcttaaattttaattttttattttaacttacattaatttctcactacttttatattattagtttttttaattctattattttttattaactgtatttaatttctatttttttattacttaaaaattttagagagacacggaattcccctatattttcttcccctatatagagttagttttgttaatttattcaattaattaggaccccttaataagcgcttttatttcttaccatgtaaaagaattcaccttaccaagacaatccaacttgttatatatgactatgaaattaacaattaggtagtaaaaactcattaaatacatggcatgttgagtaccaacaccaccacttagcaaatttagagaaaagtgccacatcaaaattgtaagaatcattggtctttacttcgtttcaatttaatcttttaattcgtacattcacaaatttaattggcgatcaaataatggctacatagcctactcgtcattttccattactatatatttagtgtctaccatctctttctttactcatagttttggaaaggattgagtagctgaaatggagttcttcaaagtgaagctctcggacaccttcaagtccatgaagcaacaggtctttctctaaactccctcaatattcataacatataaaaaaattgttatcaattagtttctagacttatagtgggttgaaagacacccttggttttaatttgttctttaattaaaactaaattttgctgaaagtacgtgaaattgcctcattttgctttatgtttttctccttctaattttatgatagggtttggtggatgatcagttcacttttgtctactcgttgaaaaagaatgtcgaagataatttctacatcgaaattatacctgaattttgctgtgaagttcgagatggcttgaaatttttgacacaaacaatgtaatttttacttctttgttcatacataatatgatatttttattaacaaaatttaagtattgttttataggtacttttctgtgttgtttttaattaaaacacaattacaataatatgtagacatgtttatgttttattgaaaaacagtacaaaaaatgtctataaattaaatatataaacgttgtcttattattatatgctcattatttagttttaaatttgatactttcctctcttttttctttgatgtaggaatgatcaaactttgaactacaaacttatgaaagaatatgtttataaagtcaaaggaagttcttcaaggtaattattttaatatttgcataaaggttacggctctttctcactaaagttagataaagtaaaacgagtatatatattgaactagatttaattctcatacctattttcttcaagcttgtttagtttaatgttagtacttttgcacttttgtttggaaatcttatattgcatagcgagttttattattttcggatgttaatcaatctcttttgaggcgctataatcataagacaaattccaataaactctctaaataatggtcaagatatactattttgaatatttaatcaatttatgtcaaaaaacaaaataaaatatgagatataaaagttctcatttctaactattatttatttgtgtatctcagttttggggcatgtagaatggcaaaagcacttactgactttgaacgcactattgatgcagcctctaaagaagagtaatgaacaccaaaacctatatatatattagatgaacttaaaccctatatttaatagcatatattcaataaacaaaacaaaaacaaaaaactccatggaacattttaaacaaaaatctctttctttgtaggtgttcgaaggcactgaaacaagttcaacgtgaattttctgctctagaagaaaaacttcatatttgccttaaggtaattattttgtacatatttttcagttaatagtaactcatgaataatatgcacatatttgttccttgtcaatataagtttgattgtgttacattaaaatacattgtttccacgagaacattacagctaaatctacaagattagacttgacactattacttaagggttgctttgaggtgtgttattaattttattaaataagtctattagagaatgaacgaatatttgaattgtttaaattgaggagactaagactagtcaaaagtctttttacatagataaaatgttagtattaacacataaatgtttttaatttcaactgatagtgcaaagtattttcatattcccttctggtttgtgatccttctagtgttttggttactatgtacaattgtcttcttagtctatcacttttaattagaaaattgcattgatattgtatcatctttattatgtacttattgtgaaaactttttttgttacagcttgaaagaagtttagttctcaaagctattgagggaacggccaatatgtgagagtcatgttttgtgtaaatcaatttattcaaatcaatatgaatagattgattttttgtttttctttgtagcaaagatattgcgtttggtttaaaatattgatatcgatctacatgaattatgccaaaatattattattgcaattagttttgtatttgaatataatctccattttatattatatgttaattcgagtctcattaatcaaaatatatgttcaaacaccacctttgttatcaatttgaagggattatgtgagagtcaatttgatatggttttattgacaagaatatatatatatatatatatatatatatagagagagagagagagagagagagagagagagagaatgcattgatatcacttcagttttttaatacatagatagatagtaactaaaatattcaaaagtttttttttctcctttttttatgttttcatgagtaattataatattttaaaaattaatttagatttttacattatagctaactattttcatacaaatatcatagataaaattatcgttggtgagctaccgcgagcatgttaattataattttgggtgagggggttccttggaaaataattaatgaacatccatatattatttaatacctagagagataaagaaagagaaatatatatatatatatatatatatatatgataaatattatatgataaaaagagaaaaatgagtattatcatatttataatagagatgtgttcatgtatcactactccaattccttttatgtgttgcagccgagcttggttatcagctagcatatttattcgagcatttgttgggcgcaaggaaaacaatattcataattagttgaagatcaatgagttactatatgacgttgaatttccttgattttagcagttatggtttgtttttagtacaggtaagtaaggtataaatgtaacaaaaatgttaattaacaacacgctcttacattcctcacatactatataaatgtaagataatcttgttagcattgttatttttgtaaacttgttttttactcaatgggttgaatactctttcaattcttaccaaaaaatataaaactatagacgttatttttctgacaaaatctgcattgctaacataaactattgtgagttttatgtgttaataatgttaatagtatatgatgcaatattaaattaatagataatgcagttattatatatatatatatatatatatatatatgtatgtatgtatattatcattcatagtatcagtataatatatttagtgtaaatccacaatcattacactttagtgattcatttagtttaagcccacaatgattattcatttaatccgtacaccaatacacaagctaaatgcgtggtatatataaaaatagaaaaatcaaatacactctcatggtgtgcttggaagtgatgaaaacccgggaataatggatgtagaatatcgtgcattttataaatacattgacttcttcctctatacttattcatttttcatctcaacaaagaaaacccttaagaacatatacattttacatgaatattatggttggagtagtctaccataataagaagctatcaagttgagatggaatttgagagtcttcgagatcatttgatggagagtgaacatgtctcccttcaaatgtggttatcaccatccttggatccttggcgaggcgttccacccgtttctttacacgacaattatcttctatgcaacggcaatagcttctacatgcaaatgtagaccaaaacacaataagataacttcatgattcttataaccgttcgatgagttattgtgatcgatggtattgttagagagtgacttttattccaactgatgaaatattcaacctccatggtagtgtgactattaataataaaatatcttcatgctataatcagaatcagtatctaagagttatcaatatcatattaatgaaggcactataaaaaccattttgtatttttttccgaaagtgctttaatgggtttgtgagaaaagcaagagtatcaatgtatcatgatctactcggtgagtgtaaggaaaaagttctagtagacacgtacatttacatatactatgaatcttgccgatggctctttgcaagtcgacattgtaccccggaatagtcagtcaccttggtctgacttagttataacatctgagggtcataattatttagtagttctttaaccttggcaaaattttcttcctatcctttgaacaaatttatatatgctttatatatacattttgaacttgacatataaagtgaacttttgcttttttatatatatctttaattattataggcatccgcacattatttagaaaattaagatcttgccgaaactagtagcaaagccagttatgcgattatgataaaaacaataatgaaagagaggtggcagactggagagagaatatatgttgcaagtgttgggatatacactcgatcatcaaaggtttgatcaatttaacattcttcaatcaacttaaaaattaaagcaaaaacaaaaagagggaagctttgaattcatgatcatacctagggtgatgcgtgctcttcacaactttctgtccatacttcctccacttgtagccatcgtccaatacatccatatcgctcatggtattgaagcaaaacctaggctctctcaccttccttcttgattttcttcatcttcgtggctgaaattccgagatgatgatcatcaaattcacttcttttactgctgaagcaatcagccacttctcccaatgccctaaattcacgcataatggaatcccaactctttttagctatatatagagaatatatgtttctgtgcagaaaaattgttacatgatcctatttcatcatggtcttaattataatcttctcataacatgcaatcaagtactagaattttttaaaaaaattgaaaaactcgattacatgttacttaaaaattaatcagatcaatcataaacatgtagtaatttagaattatctaatatgtttttttctatctaacggttaatgaatttacttaattacatgacaaaaaaaggtcaatgtgcgtggttggatattatgagaatttattaaagtgttattgtctcaccgtggatttacacttaatctatgcaaggataggaattgagctcctccaaagctagaagtgaggtcttctcttgacttttgagcagtggttgagaatagggtttctgctgttaggtttgatgcagaatcttgttgagatatagcaagtgaagaaggtgttatggagattacatcctaatggaaagcaaaaatttataacgttgcaaaaccaactttcccttttttttgctttgcctctttttctttctttggggatttgctcatttttttaagattttattcttttaaaaactaaatttaattagccatgtaattttttttaaaaggttattgtcctatttaactaggcttatttaaaattaagattttcatctatttaataattttaataaagaatatatttttaataggataaacctaattattcaaaattgggtctattcctatccctacttatatgcaatatttttaaaacaataataaaaacattttatttaaatatttcaacacacttagacatacataggctatgtttgtttaggtgagagggagagaaataatattaattctaggtggatagcttttacactttgttttaattaaaatacttttattttaattatctctgttaccatcctctaaagtctaaaccaaataaaacaattgaaaaagatgtgtttaagtatcagatttgtaataatgttttttgttagaagtgtacaaatatgtgcaacttttgtccaatgaatgaattgaatgaagtgtgaaaatttaatctcaaatttattttggttagaaccaactcattttttttaatctttaagtctttctttgggagagagattttagagaggaagggaggaaagggaaaggtttgaataataacatctccttatttgagagttttaatttttgaggaaaagaatttgaggatttttaaaactcattcctccaaatcattaaaattattgtttccccgatttggagatttttagaaggtaaagtaataaaattactatacaaaccattatataattttttcaatttaaaattaagttttatttgtaaaatatagagtgtattagtttttgaagtaaagacaaaattataaaaatatcttattaactctcaattttcctcgtgaataaactttcctctcttttcttcccctcatctccggagactaatttctcaaagaaatagaataccaattaagaaaacacttctcttctcatatgggttgtattattattcacgcgtgtgcatattttttaggaaaaatagccatgtgttggtgtgtaatattaccttgatgttaattttttaactgttaatattttataggtattgagttttatttttaattttcagcacttatttattattataaccgatacagtttagttcatttctattattctgtattctgtattatattttactattttataataaaaaaattactcataatattactaataaggtcaaataaacttttaaaataatacaattaattaaaactagttgaaatattatatcaaacagccactgtattacatgtcacagtgtcatagattgaaaatattattttaataaattttgccacaagatttaacaagttggtaaaaaaaataaatctctcgtcatttaatatctcgaccattgtctaagattcaacaaataatcaacactcatacttactggaaaagtgctaacaatacgtttattgaaatttacaaaattataagtaaaactcatcagataagaaataaaacttataaaaaattataatttttagtaaattttacaataatggagtagctaatgataaaaaatatctttacaaggctatgtttttttttttaaaacgttcaatcatgcactttataaggctatgttaaataatggagttcgtgttttttccccttccccgtataaataaataattcctatattttttgagcaaatatttcctatattattaagagtaaaaataaaaataaaaaaacttacggagttggatcgggcatagaagcacacagtacagtagagaaaccgaaccaaagcgtacaccttccttccttcgtgttccattgcgctaaaactcgctccattctcaactcaaaacctcccttcgcaaaactcaatctcactcactctctctctatatccatgttccatggaaagcaaggattctctattttaatcccttaatcatcgccctactccaggttctatccttttccatttttttctctctcgatttctcctcgatgctattcgaactcgtcgtttcttttttaaataatatttattgaatccggattggtttcgaggctccacgtgtttccgattacaccattcgattccaccaccagcaattcacggctgttttcaataataataataataaaaacaaaaccgtggaaatgaaatagaaacacagacttagcctgttattgctatgctaccgttttttgttatggagaataactcagtcaagtgttttgtattgtgagccatgttagatcattcattacgttcatttattttagtgtttaagttagcgatgaatagttctttggatatttggataactagttgttattattattattattttatttattttaacgatgttttgtttttgtgaatatgcgtttggttgaatcaggaagaaaatggattttcccttgggtagtgaggatccagctatacttcagctgcacaactgggacctgtctgagacccgaattgggctttcggactttcgtgaagcttttctttctcctaccagagagatactgcttttgcattcttatgagagggaggctcttttacttcctctgagtaaaggtgattgctgctttcctttattcgtaattttagtttactgtaactgaatagcgtattttatttttcatgtgcaaatgcaattctgtgtttcggactagttgattattattgttgtttcggactagttgattagtattgtgcatttgctttgttgcttgcaggagagttgcattctggtggtgctgaaggtgactatgattatgagaatcacaacccaggttcagcagatgtttccccggaggcatccactaggcccagtgaatcggttttggtgaatgattcaccttgcacttctgggtcagatactgatgttgatactgatcttgctggaattaaatgttcaaaatccaatagttgcccatacattagtgatgtgaactcgttggcctgggctcgttgtgaggacggctatgatcagcacaatgatgcttcatttagagaagttctatttgtttctgggagatgtggggtaacagtccatgctttttccaaactaacaaaaactaagggaatggttcaacccatgttagagggtaactttaggcaaggcaggtgggtggaatgggggcccattgctacattatcttccgacttcagtcgtggagtctctagagaccagaatgtaaatttgactggagatggtggagttgaattgttaagaggttctgctactaagagatacttagaatcatttttcacaaatgttgaaactactgtatctgatggtagtcttttgaccaaattccctgagaataatgaatttccttgctcgacaaaagtggtttcttttagcatatttgatggcagtctatctttggaccatctcctcaaagaaaaaacagtccaaagtaaggagaattggcaggaaccagctgattcagtaagagatgcttctgatcactctagcttgagctcttgtggagcagatactaagcttgattgtttttccagtgtttttggtgttgtgattaatgggttctatgaatgtcgcagagtgttctcgagtgcttcaaattgcctggtaggttttttttttacattaatgcatcacgtgtctgtcaatattagtgatgagaatcaaagaggcggaagtggagatttagttcttgttgccaagttagataattggggtattcggtgggtttcaatggtgaagcttgatgaaagaataaacatagttcagtcagttgagtggatggatttcaaattttctgataatcttcttgtctgtcttaattcttctggcttgattgttctctattctgcaatgtccggagaatatgtgacacatttaaatgttttacaggaggcttgtggccttaacccccattttaatttgcaagggttagaaaagttatattcacatgttgatatatatgctaaacaagagtgtagcattaaggataacatgtctgatcagcagagtgattcttttaggagatcattcaagaggttagttgttgcttcacacacctcccttttagctgtggttgatgaatgtggtgtgatctatttgatctctttgggggaatatatacctgacaaaaattattcatctgagaagttgcttccacattgtcagcaatttgggcttggaatgttggttggctggggagttggtggttctgatatagatcgccaagcagtctactccaatttatctggacattttcaatcaaatgatttaaacataaaacatggaagtgttgcttcctcagacaaagctgttgcaggtaatgcacttcagaaaactaatggctgcacattcaaagaaaaggggaatttgtttggctcctattcaagtggtttttctgctacttctaaagtaaataatggtaacaaatttcttggttatgatgtgaaatcacctgttatgagaaagatattccttcccaattttagagtctatgaggatgattctatttgtttttctcctttgggaattactattttctctaaaaagaagtgtgtaaagaatcagaatggttctcagcttatccattttaatctgcaagtgaagttagaagtccatgatgacaacttcttagacagtgtatatgatgtataccactttgatggaaaagatgttattggagaagtcattggttgcacattccaaggttgtttttatattgtgagagatagtggtctatcagtatatattccctccatttcaattttatcaaattttcttcctgtggagtacattggttatcgtcaatcaagtaaggatatggggatttcagttctacttaaagacaatctaaaaataaaagaaccgaccaaaaggttttctccttggaaagttgaaattttggacagagttcttctgtatgaaggcactgaaatggcagatcaattgtgtttgaaaaatggtaagtgttacaaagaaaaatcatttttcatttatctataatatgacatctcttagtcttctccttacttgtcttgggatagactagttcatttagtttgtttgtgattttgcatatggtttatagagggatgttcctctagaaattattcatgggggccaatggcaatttctattttaacagaaaaggaatataacaaataaagtactggaaaaatgataaatcttagctgtaagtctttccaatctctttccaacttgattgggaaactcccttaaacacgtataggccacaaaaaagttcctgccctctggctccttatgtgtctcattggacagcatgcaccaggactggacaattttattgtttcaagaaatgccatgtcctcctaacaaatcctcctaactacttataagtaataaatgaaataactgaggcattcgatatcttgggaacccgaaaaacatttcatgctttcttctttgattagttaggagcattttgagcctgattcaacaggaggatataaaatcatttttttattatgcattttatttctgcaactttctgtaatgaggatatcataatttatgtttttcttattcaatgtgacatagtgacagtttcttttttttttctgtaaaggactcttatttgtttcattgatttaattgcttcatttcaataaaatatttctctgcattaaatgtttttttatagagaaaatacaggtgttcttctattccaatttctgttataaatgctttttgatatcttggcgtgttaggaattttagggctagccaaccaggtgaattaggatgtgattatttgcattatctttgttaacaattaacatcttcatcttgaccaatgccaatccacttgtcttgaattgctgcttttggtggtttaccttctcttgtcttttgctgctaaaactacctctatttcaactcatgataaaccatcattttagtctttgaaagtgtataatactatcatattagtccttgaagaaattttcaaataagtcactgaaattgcaattcgtcaatcacattagtctaaaattcaaaaaaaggtgtgacttaggtgataatattaacatatatttggagaccaaaataacagtaagagattagatttaaggtctaaatgaaatttcagggactaatttggaattccttagttttggaggctaacgtgacaacactatacactttcagggaacaaaatgatgctttactcaaatcttattatagaaaccaggaattgtctattaaaggtgaataaatgagaaactgattacaaagtagaataatttatggtgatgttaatctaatttttgattttaaaatttgacgtgtttgtgtaatgtggtggtggtgacacactactttagaatttagtgaaacaattttaggtgcatgcttatttatttatttattttttctttgtcaggatgggacatcaaagtttctcgtattcgtcaattacaaatagcattggactacttgaaattttatgaaatagaaaggtaagccaaaatttattcattgcaggcttgatttatactttttgtgctttgaagtggcaatcttgtgccataatgtttggtcatgttgtttgtagtattatttggggaagaagggtagggggtgttgggggaggggcaatatcattgttattaaacttggaccagttatcaacttatttgagggtgttaggttactatttcaactattgagtcacagggtgaattggttaagcagatatataaaatatataactatttaatatagattaaaaattaaaattctacacttaaaattataatttaattcgattacacttaaattttttcaacatttaatgagtctcatgattttgtaatctatatctatattaaatccgtccaaaccaatgccacttgtcattgtatggtgcactgcagcccaccatgttctctccattttcacctttttgcttttattttctctcttctgctgtgcaaatcacaggttacttatctagtttccaatgaattttgatcattagtaaagaatgtgttagaaggagtgtgttgtcaacactcctctttaggttttactatggcaaatattatctaatgtaattcactttccagttttattgatgaacagatctttggaaatgcttgtggatgttgatctagcagaagagggaattttgagattgctttttgctgctgtgtatcttatacttaataaaggtggcaatgatagtgaaacttctgctgcttcaaggtaaatttatttgttcattgcttacttacctatattttttgttctttatcattttcaaaccaatttgctacttgctagacatgtcatctgtgtaaaatactaaaatatatggagcaaatgtccgttttggttctccaaagatatatgtaacatcacattggtcctatagcttatggtttgtttctgtaggatagctatattaattcattttgggaaaaattgaaaataaaatcgaactgttagtaaaagtatttccactttaggactggaatttccttatgtctacactggatgaggaaactgaagttaggcaatcgtcgatatatccatccattgattaacaaagctctctttcttgtatgaacttgtggctgtctctgctgagggcctatataaagttaccattagctatctatgtaatttgttattattacatgtaaaaaactaaaaattgatccaagcatgataggcatgtgtttttcctgcttgaacactggatattgctttcaagtttcaaagttaaatcaactttcatatgtttttaggaattttttactgttttcaagtttatttcaattatttgactaaactcacttctaaataacgtaattttattgttttacatggtatactagctgacgcaaatgcctgaagataaatttctaactggtgtttgcataattcacatttatgtaacacgtcccttactagaaaaaaaaaaaattcagtaatgtgatcctttttgctattagatagcaagagtgagttggctatatcggaggctatatcaatttttctattcaattagtcactgcttgggttgtcaatattctgtttgatttctttatgtctggctctatattcttaaggagaaaaggatactcatgaagctatgtacagcatgcatggtctgttttaattctgattttattatgtttttgttgtcaacatctataggcttcttgcactggccacttgctttgcaacaaagatgctccataaatatgggttgctacaacataaaaaagatacatgcatagcagagggctttaacaagacgggattactttctcttccaccaattgaaccagttaaactacaaactgaggtggattttgctcagaaactttgtgagatagctcatttcttggagatcatccgaaatctgcaatgtagacataggtcaatatttcgaagggccagccaaggattggtatggtgctccatggttatgctacttgtattctgcttaaattggttacattattttttctgaaaattaaatcgtatcttgttgctatatacaggccgacagtggagaagagtcatctttaataagtacagacatgttgcaggaagaatcccaactttcaattcttccatcagatttagagtcattggatgtgttgaaccaacatgagctttcttttcctctaccaggcagcgacaataatgaaaatcttgcgctggtgcctgttgattctgagtctcatttggtctcagatgaatttggaagcatatctcatttaaccccattaggaggaattttaggaaagaaagttttgcctgtggaaaatccaagagagatgatggcacgttggaaggtaaataatctggaccttaagactgtcgttagagatgctttgctctctggtcgtcttcctttggcagttctgcatcttcatcaaatgaatgattttgttgctgataaagagcctcatgatacttttactgaagttcgtgacattggcagagctgttgcttatgaattatttttgaaggtaatgtatgttacattctcattaactgttacaaattacaatgaaaataaccaacaccttgcaattatatagggtgaaactgaacttgctgttgctacacttcaaagacttggagagaacattgaatcttatcttaaacaacttctgtttggcactgtaaggagatccttgcgaatccagattgctgaggaaatgaaaagatatggttatctagggccatatgagtggaagatattggatgatatgtcacttattgaggtatgtggaattcatttgtcttatttttgcggtcaatgtagtgcagtttaactactgggaggaaaaatttccatgagctgagacttgtaatcttatttgtccctgtgcatgtatatgagaagagtctctatcctagcagtagcttctggaaaacatataatcgccgactgaaagaaatcagcattgcaccggactctgttttaccagtggaaaataaattaaggctcttgcataaccattcatttgatagtcatgtcattgaatgtggtgagattgatggaattgtctttgatgcatggattgatattagtgaaagttcctctgctctggaagttgatgaagatgatgctcatgttggatattgggccgcagctgctgtctggtttgatgcctgggaccaaagaactgttgatcgtgtaagttgcttctctgttttctctccctttatattgatgttcatttttattgctgaattttgatgaagccaatgatgattagcaactttcttcgcctttagaatagtctagatggtggattttaaacttgttttatagttgcatttactaatgaaataaagaccgaaagagaaggttagggtaagaattctttaaatttcggtttcttatgagtgtgacgtttctgttggatcaggttggaagcagaagtgcttatgccctcttagagatttgtatttgatatgcatgtgtctatttgtttcttgaagtccattagtccaccaatttgcacctttataacatctatttctggatgctctagttgttttggtttgaacttcaaatcaaagatttctatactttgtattagaatgtgggtttagacccaactcaaccccaaaagctagcttattgggtgaggattgttcttcacttatatactctgacttggcactatctctagccgatgtgggacttgggttattcccaatactttgaattaaaattttagttgtgatgaaaatttgcttccccctattgatgtattcagtcattgtactgctcttagtcattaatttaatgtctatatctcttcaaggacaaagatctttatctatagtaactttatttttcattttcattcatctttgcatgtacagatgatattgaatcaatctgttcattcggacaattctatatcgtgggagtcacaacttgaatatcatgtttgccgtaaccactggaaggaagtctttagactgctggacttgatgcctgcatatgtcctatcggctggaagccttcaactcaatttggatcttttacaggccgcctcatctttaggatgcaatatgaatatgacgtcttctaattatggaaatttcttgtgctcttttgaagaattggattctgtatttatggaagttccagatgtccaaatgtataggttttcacctgatgtatgttctgggtggatgaggatgcttgtggaggaaaagcttgcaaaaagatttatatttttgaaggaatattgggaagggacattggagatgataactctcttggctcgttcaggtttcatatctggcacagataagatcttcttggaggatgatcttactaagacatcatctgtcagagatggagctgtacaaactttgcataaaatatttgtacatcactgtgcacaatataacttgccaaatcttttggacctttaccttgatcatcatagtttggtcctcgaaaatgattcactttatgcattacaggaaactgctgtaagtttctttatgtccattgtttgatattgttattctgattgattgtttttggtctttattatttcaaatcacgatgctagtatgcttccataagctgttaatgcgctgaaatttgtaggttatgttgtttcatattttttggttggttttcaaacttaaacgaggatatatagctcggaaacggaggacaaaaattcgtttatttacaccattaaatctatggtattataatgcaaatttagttgctaattcaggtaacctctttccttgataaaggaagaaattccataagatgaagtgaaaaaatatagcaggaatatggaggacaggggatcctccatagggaaaaagggaaaacaaaactatagaaaaaaaaaaccatcaatagagcaaagctgctcaatccctgtgaatatctgttaagaacctctataaatgactttgctttacaccaaacagaggctgatcatttaattttatctgtaatcagttagagtcaataacatgtcattaaaatacaagtgttacattccaatcaaaatgtacacgacaatcaacaaaaatcagtcgaagaatttttacacagattgcacattgccataaaacttttgtcattttacttttaccataaaggcaaaaaccactattgctagtcatcaacaaaagttagtccaagaacctttctcaggcctatattcacccaaaaggctgaacaatacactgtaaacagacagaagcagaacaatgtaggaacagatgaagaactagaaccacacatactacaattgttaggataagagactaggacccttattttaccaatctaaaatgtgcgtcagcattaattctatgacacacacgagtccaaataagagactggccttagaaggaattcttgtaaattctatttctttatgttaacaccgctgacttgcatgtgttatgtagttaagcctcttgaatctacgttgggcccaactctactccatgtgatttgcctttgcacctaggattggacatcttgagtgtggagattgtaggtctgactttttaaagctaaaaagttgtagtccctataaaatgtgtggaaaatgattttcttatagagggtgaataaataaattggagaaaacagagcctgtacatcaatctaatcctaaaaatcaggagccataatttccttggaatctctacgtgctaaaaaaggaaaacaataatataattgatccgataaattaaaacaaatgattaatgtctagatgtacagaggatctaatgatcctgattgattttagagaatgttaagccatcgacaaaatgtgttttttgttttgatcttgttaatttttttatctgtttgtgtccctattaatttttatttatttattttattacggtccctaacatggctcccagtccattcacctcattatttcaatccctataaaattgtaaacttttgatataggcttaaatcagtaggttttcattttagttcctgttatttaggcaacatcagctctgccctgttttgcaacctctgctacccacatcatcaattatgacttaaaaagggaacctgatgtcagtgactaaaatgaaaaacaattaatagggacattgataaaaaagaaaaaaattaaagaggaccaaaatgaaaaaataaaaaaaataaaaactaattttataggaacaacttatttaagccttttatatattgtataggaaagccaagaggccaatagattgcactggcagttgagggtgcccaaatattagatctatggtagactttgatgccattttgaatatgggttaggtctaactctccccccaaagctagctcatgagataaggattacccaagcttttataagtttcactttagtcatatctatggtcgatgtggatatattcaaagccaatggattggcccaatgttatttattaatttttgttacttttaaggggctttaatgttgtggacattcaatattgcttatttctctttcattattttaatcaacctctattcttccaatctttatgttaacatggatgtctttgctttaaagacgttttagtgttgcatgttgatacattgcttctcaacaggttgattgtgaatgggcaagatggctactcttatcgagagttaaggggtgtgaatatgaggcctcacttgcgaatgctcgatcaataatgtcacgtaatttagttcctagaagtgacctcagtgttctggagttagatgaaataattcgaacagttgatgacattgctgaaggagggggagaaatggcagccttggcaaccctgatgcatgctgctgttccgattcaaagctgcttaaatagtggtggtgtaaataggcatagttattcctctgcccagtgcacattggagaaccttaggccaactttgcaaaagttccccactttgtggcgcacactcattggagcatgtcttggacaagacacaatggccttgctggtccctaaagcaaaaactggttagctattaacctcattttttgggtgaacccccaccctcttctcctaagttacttgggcacttaaactaaccctatttttttgtgtcattttttgtctatcacaatattgcaatgcagctttatcagactatcttaattggcgtgatgacatcttcttctctactggtcgtgatacttcacttctacaaatgcttccatgctggtttcctaagcctatacgcagattgatacagctttatgtccaggtctgttttattctcctcatctatatgattttatgattcttatttaaattcaaattatactagtctgtgttgttattatgatggcttcataaccaatctcttgttatctccttctggttggttataaataccttactctgtcatgtagtttgtatgttgttacagacaatcatgtaatatgtaagcaatccacattatgtagttttctttgcattacagggtcctcttggatgccaatcattttcagggttccctacagggggaactttgctacacagagacattgatttattaataaatgctgatgtacatgctgagataaatgcaatctcctgggaggcaactatccaaagacacattgaagaagaattatatggtcctttacttgaggtatgggcattgaatttaattgcttgtttctctcttattctccttgtctctgtttgggaggatttattgtctgactcaatatttttgtactcaatttttctttcttgaaaacttctaagaaatgttttactgcctaaagcttgtttagctatatagtatttgcagttttattggtactacagactccaattgcaatagtgtgaggaacctgattatgagtatcctctcgattgaattctatgcagtttctggtttgtgttgtcagacttaataattatgtgacaattttcttgaccgtaagaggggttttgccctaatcaaatagttttgaaagcaattgtatgcagtaaacacacacacacatgcacaaaaaaagacaattctgccaaaattttgcattatttggtagttgttggataagtcaaaagtgtctgggaccacccatctattgaaaagtcattaaccatgccaacttgttccaataaaaaattctggctaactattatttttcctgttaggagcttaactctaatatacaatattctcctatatctgctgctataagtgcagatatgcaatttgctgtattctaagtatatttttctactgtgtattggtaatttgaattgatttttcaggaaaatggattggggcttgagcatcttttacatcggggacgagcattggctgcttttaaccaaattcttggccatagagttcaaaatctgaagtcagatggggaatctagtacttcagctcacggacaaactaacattcaatcagatgttcagacacttctttcaccactaggacaaagtgaagagactctactttcatctgtgagttcttgtttgtgttttttaaatagattttcttgttatgtacttgaaatgagagatcaaattaaaacaaatcaatgcattatgttcaaatgttgaaaaaatgcttgctcttttaccacataaaaatcttgtattgatgataatgttcataattggcgatgtcattactcccaactcccaagaccagcttctaaatgatctgtttatcaggaacaaattcaacctaaaagtttaaaaaggccatatgagtagtttatatctctaacatgcccctaagagtattttgggctttaagcatggaaaatacataagtccattttaatttatgctataggttagttgaattatgacaaatatgggtggcaaagatcagcttttgatcacttggtcattggggatttggaaccttgtgaagaacctatgaacctaaatgtttaagctgtttggttaaggatatgaatgattgtatactttaactatccatttggtcttctatcaattttatgttacatcttagggtttcttttgattttgatgctggatattctcccatattctttcctaatattaacatgattggctccttgcttgattttgtaatttttcattcatgaaaaatacaaaaaagaaagatatgactctcattgaagttttgaatggaagattgaaaactgttcttaaaattctcaggttttgcaaattgctattatgcattttgaggattccatgcttgttgcttcgtgtgcttttcttatggagctatgtggtttatcagcaaacaaaatgcacgttgatattgctgtgctaaaacggatatctttgttctacaaatcaagtgaaaatgaaaatctcaggcaattatctcctaagggatctgtgtttcatgcaatatcccatgaaggtgatttaacagaatctcttgctcgagctttagctgatgaatatttgcacaaggattctcctgtaaatggttctgagagtgtaagtaaacaaccttcacgagctcttatgcttgtgttgcaccatttggaaaaggctagccttccacggttggttgatggaaaaacttatgggtcatggctattaagtggaaatggtgatggaaatgagttaagatctcaacgaaaggctgctagccagaactggactttggtaacaaatttttgtagattgcaccagcttccgttaagtactaagtaccttgctgtattagctagagacaatgactgggtatgtttctacttctgtttcttttattaactactcaaattataatcttattattgtttttggcttctgtcagattgaatttttgtctgaagctcagattggaggatattcatttgatacagtagtccaagtggtgagttctgttccttatcttaactcatcataaaatatatatcatatatatgatatgctaaagtgaaactgtttcactttgaatttatttgtgattgtgaatgctaggcatcaaaggaatttagtgatccgcgtctccgacttcatatgttaacagttttgagaggaatgcagtcaaagaaaaaggcaagcactgtattattcttggatacactggagaaaggcagtgaaacaacctttcctgatgaaagcatgggtgttccagttgaactcttccaaatattaggagagtgtgaaaagcaaaaatgtcctggagaggctctcttgaggaaagcaaaagagttgtcctggtcaatattggcaatggttgcttcatgtttccttgatgtctctccattgtcatgcctgacagtttggttggaaattactgcagcaaggtgactgggactctatataagtaaaatgacattttcataattgtgttctggttatgttttatatatttctatttagccatttctgatgtgaagagcttgtagttttgtgtgatttaatttatgttgagcttgagtgtgaacctggttatgttatatatatgtatatatatttatatatagccatttctgatgtgaagagcttggagttttgtgtgatttaattatgttgagtttgagtttaaaagtagtctatgttacagtaggcaaaatctgcctgtctttttatctatattttaggataaagtaacagcttgaatgaaattgaatcttacaaacagcaggagttattctttttatgtgatggggttctcgcaaaatccactgttgaattaaaatttccatcatgaatatcatggaattttacattcttctaaatttttttatattgcatcagcacatgttaaaactagcattcaaattcaatatatttagtttttcatgcttattggtgtccaattttttaaaaaaaattggtaagacaaaagcaacattctatccaactccacgtagtagaaaatacttggttcttgtatttgtataattcaataattggactgaaaattcacattatatgatgaattgttaaaggtctaagcgttttgtgtcttataccagtgttaactgatccacatgcactcaaacatgtgtatagatttcaatgattaaatgttgaaactcaataccttttatctgtgggcagagaaacttcatccattaaggtgaatgatatcgcttcccagattgcagacaatgttggagcagctgtaaatgctactaataccctgcctgtaggtgacagagtacttgcatttcattacaataggcagagtcctaaacgtcgacggctaataactcctgtttcgctagactcctctgcttctgcaatatctgacatctctagctcttctataagtgaaaaaatatttgattcccaaggtaaaactatggagaatgatagaaaaatagaacattttggacgcattaatgttcctagtgattccgatgaagggcctgcttctctctcaaagatggttgcagtgctttgtgaacaacaattgttcttgcccttgctaagggcatttgagatgttccttccatcatgccccttgcttccattcattcgtgctcttcaagtaagccaactaattcaaaatttatctgttcatttagtgtatactttagaatagtggataccatgttcctcaggtgtctattgttgaatacagtattcttttttatgtgctgctgcatctttagcctagttctataaaaagtggtcttggttttaagtgccagtgtctgattattttttacacatgtatcttgactttctttcattcagtatttcttttttcagggtaaattacacttcatccccttgtaacatgccaatgtgtaaattctttttatcttttcttcaggcattttcgcaaatgcgcctctcagaagcttctgcacatttgggttccttttctgcacgaattaaggaagatccaatctacttacaggcaaatgtaggaagagaggcacagattggggcatcatggattagttctactgcttcaacagctgctgatgctgtgctttcaacctgcccatctccttatgaaaaaagatgcttactgcaacttcttgctgctactgacttcggtgatggtggacatactgcagcatactatcgaagggtttattggaaaattaatttagcagagcctttacttcgtaaagataatgagttgcatttaggtgatgaaatttcagatgatgcttcactcttatctgcactagagaataataggcactgggagcaagcaaggaactgggccaagaagttggaggccaatggtgcatcctggaaatctgctacgcatcatgttactgaatctcaggtaatacttaaaggttgtaaacatgtttgtgacctgtaatcttaactgaggggaagtcttgagccgatattaaaaaccttaatcaattgaatggtttgtagagaaacccattgtaaataattcaaggtttctccaactcatgttgatattactgcagacgcttgaagtgactgctcttcgtaatcctatcttctattaataattataattttggtctgtcaaacttcatattagattaattaatttttctttgatgggcatgataaaactcgttgtaatacagactattgccaattgaaaatttaggattatgaacatgtctcttaatgattgcatcttttatacgtgactctgttgttacttgcaccgaattgtacaattgatatgtcatgtcagtttgactcatactgtaagtatctggttttaataaattcttgtgcagatgatcatttcatttgatcaaatggatggcaaattcttttgttgaaaatgaggagtttttgttgacaaaattcactttttaaagattgaagataggacattactgaaatattaaaaattcaacttgagtattaaattgtcttaattttgctgtaaatctgagctcgggtggagcttttaatttctttgtcattttaaatgaattttttctttgacgacttttagcaattttagttgatagtttgcgtatttctcatcaaccctttaccctcatctttctctgccccttttataaatggtaggctgagtctatggtagctgaatggaaggagtttctttgggatgttccagaagagagggttgctttatggagccactgccacacactattcatcagatattccttcccttctcttcaagtgtgtttggtttatactttctagtactatagtcattgttcagctgaagatatatgctgaaattttatctttgttgtaatgattgcaggctgggttattttttcttaaacatgctgaagctgtggagaaagatcttcctgcgagggagcttcatgaacttttattgctttctctgcaatggctgagtgggatgataagtctttccaacccgtatggaacatattcaagaatttactttctgtttcaattttagttattatctttacttaaactttactgaatttttcagtgtctgtccattgcaacttctgcgtgaaattgaaaccaaagtatggctcctagccgttgagtctgagactcaggtgaagagtgaaggagatttcaattttaccttttccaccagggagagtggtatcaagaacgactccagtcttattgatcgaactgctagtataatagcaaagatggacaaccatataaatacaatgaggagtagaattgtagaaatatacgagtccagggaaaataaccaaatcccccacaagaatcaagtgatggatgctggtctttcaactacttttgctgggaatacgaagacaaaaagaagggccaaaggatacatggcaccaaggcgcccacctcttgaatcagcagataaaagtgctgatactgatgatggctctagttctattggtttaaagaatgagttgcagctgcaagaggaaaacgtaaaagtggaaatgtctttttctaggtgggaagaaagggttggagaagcagagctagaaagggctgtactttccttattggaatttggacaaattgctgccgccaagcaactacagtataaattctctcctggacaaataccatctgagtttagacttgttgatgcagccttgaagcttgctgctatttcaacacctcctagcaatgtatcagtgtcaatgcttgatgaggaagtgcgttcagttatgcaatcatatggtataatgaatgataagcactacgttgacccgctgcaggtagttgtccaccggacccccttccctgctgttattacaagttttgtttttctactgatgatgatgtgtataaatacaatattgtggacatgcaatgctaggttttggagagtttggtgaccatttttattgaaggcagtgggcgtgggctgtgtaatagaataatagcagttataaaagctgccaacaccttgggcctctcattttttgaggggttcaacaagcaaccaattgaactactacagctgctttcacttaaagcacaagattcctttgaggaggccaactttctggttcagactcatccaatgccagcggcaagtattgctcaaatacttgcagaatcttttctaaaggtttggttcatcattttatttcaattctagttattaatgtttttgcatggcatggtgtgtggtaattgataaatgtgttagacatccctcctgatcgtagatgatttttttttgtgggcttgttacctatctattgaatatagatattattattggtctagtaacctgaaggaatgttttggttttcaggggagagcttaggatggtttttatttcttttgctgacctagtcttaagtaagaacttagttggcttttttcatgcttttcatgcttcaagccacctaggttctacttctgttcatgctaggatgtaagtttttacagtactccttgtactgtatctttgcttatatatataatataattatctttgccaatccaaaaaaaaaaaaaaaatcaggatatgtaaattggtgtcattttgatttacacttttatatttgacatgtagtgtcagttatgcaggtgtctgttcaacaactgtatttagatacaattttgtgacattaataagggttcataaaactatattgctatgtttaactaattatattgccagggtgtgttggctgcacatcgtggaggatatatggattcacagaaggaggaagggcctgctccattgctgtggagattttcggacttcttgaagtgggcagagctttgtccatctgaaccagaaattggacatgctttaatgcgtttggtgattactggacaagaaataccacatgcgtgtgaggtatcatgctgatagttgtcagccttgcaatttttttccactattatgtccagaaaatggtgaattaaaattgggttctggtggggaaattctaattcatattggttttaagatgataaatgtagtcaattgtgatccctctcgttcttgttttgcttaattaaagaagaaatttattaagatgatgagaagaatatagcaaagctactcaatccctcaacatctctgtgaggacgacaccctttgaaaaggtcatgcactttacaccatgtggaaaccaagcacctaatcttgtccagccactgtttatgttaagagatatccttaaaaccaccctaatgtcaaagtgtagcaaatatttcaatttaccattttttttaattactgccaaaaccagtaaaactggtccaaataactaggacatgcccatattggaaaaaaaccaagtcccatattggctaaagacaaggccaagatagagtatataagtgggggggacaaccctcaccctttaagctagcttttgaggctaagttagtccacaacccacattttaagatggtatcaaagtctatcctagatccattaaacaagttcactaactatattatccacgaacccagcccaacagtgctgggagtgaggaggtgtattgcaaaaaacccaaatctcaaataggctagagatagtgccaagatagagtatataagtggaaaataacccttaccttatgaactagattctggggttgaattaagtccaaacccacattttaaaaattggtttacaaactacttatgtttttctaaccaaaaaaaggtcgctagtctattaaccaataattaacccataattagctggtgcccggaagactttcaggtgtacaaataatagacctgtctgtgtgtaggaagagggagagagacagacagacaggacatgccaagtgagagacttagtttattataagagtgagataaatgaagcataatcattaaatcttgcattaattgtaaggggttaaatgaccacttacatcacacactttaatgccttagccattcttacaaaatcctattttcaatatttgttcctctatccactgacagcttgacagccaatgatattgtttacaatgctcctctccctttgtattattggaagccgtaatatagatataataaatttaagtagagaaaatatcttaatttttctgctgtgttattccttttgcttgaagctgacactgttttgcctcatgaaattggcatttttaggttgagcttcttattctgtcacaccacttctataaatcatcttcttgccttgatggagttgatgttcttgtggcccttgctgcaactagggttgatgcttatgtcttggagggtgattttccatgtttggctcgcctgataactggagttggaaatttttatgctctcaatttcattcttggcattcttatagaaaacggtcagttggatcttcttcttcagaagtattctgctgctgcagacacaaacactggcactgctgaggctgtcagaggatttcgaatggctgttcttacatccttgaagcatttcaaccccaatgaccttgatgcatttgccatggtttgttcttttcaatattgctataatatcaactactaacaatgttgtttgtttagcttacgataaatgaatatatagattaatgattgtatgctgctaacatacaatttatttatgtaaatatattattgaataagtcaatacctttttgtttcacaataatttagtctagtgtatgccattttttgagccattcatagtcaaattattattttttaaatgactcggggattattgaaatattttactgttatccccactatataatatatcaattgtatggcattgcatagtctgtagttaatagctttcttcaagcagcaactttaaagtggacaagttgcttgttcctcatgctcagaaaatttttctccttttttaattcttggttctcttttcatcaaaatcaacgaagtttaatttattttaagctgaagcaaagaaactcgattaaaatgtgttgtaaataacagaattatcctaggggatccttcattttcttttttgatcttttatcatctttattctttttatattgaagtcatagtttctttattttaggggtagttcccttataaaagcatgattagagaatgtaattctcgtgtcacaaattaataaaatcagtggcttttcaactatatgtgacaatttattgtttacaattttgtgttctgtacaggtctacaatcattttgatatgaaacatgagatggcggctcttttagagtcacgtgcagagcagtcatgtgagcagtggtttcaccgctacaacaacgaccagaatgaagacttgttggattccatgcgctacttcattgaagctgctgaagttcactcttcaatcgatgctggcaacaaaacacgtaaggattgtgctcaggcttcccttctgtcccttcaaatacgaatgccagacttccaatggctttatagatcagaaaccaatgctagacgagtgttagttgagcaatctcgatttcaagaagctctgattgtagctgaagcttataacctgaaccagccaagtgagtgggctttagtactctggaatcagatgcttaaacctgaagtaatggaggagtttgtggctgaatttgtggcaattttacctcttcagccttcaatgctgattgatttagctagattctatagagctgaagttgccgccagaggggaccaatcccatttctctgtctggctcactgggggaggattgccagctgaatgggctaaatatttaggaagatcattcagatgcttactgaagcgaacaagggatttgaagttgcggatgcagttggctacagtggcaactggatttggggatgtcattgatgcatgtacagaagaaatggataaggttgctgacaacgcagcaccactagttctgaggaagggtcatggtggagcttacctccctttaatgtgaaactttctgctgtagatcataataatgattggataatcacgatggacaggaagttggttcttgaccttgaaccattgatcagggaattttgctgcaagcattgaagattgcaagcagaaacctcaagtgttgaccaattgaaaattggatggttagttggtgaaagtgagatgtataatttttggtcgagtaaatgcttgatggttgtatattgggccgactgtatttatagctcattcttgtaaaacaccattttagttttggttttctccattttttttgcagggaggagaggatagtttattgtcggttttgaggctagtagaatagaatgccccattggtttcttttttccttcttttttccccctccaaaatgtatagttcctgtacatcaatataaaaaatccatttgtcatgttttacatgctccaattctatcaacaaaatgctcatgcatagtgctgttttcacacataaactataggcagactttagttttgctcaagaatttagagtgctagaagctacactagttctactcctaagaaaacaccattgaagactatagaaaagctatgaagaagataaaataacaattcagatattcttcattgatgatccattacacaatgcataccctatattaaataggggtttacaaaagataccaaccatacaagtggcatcatctagtgcttttaggaaagtaaaataaaactaaataataacaaaaggataatactaaagtcatctaatatttaaactgcttattgacttattggatttctttaggttcatcctatctggaacgcgtgtttttgagtgatgtcatttcaattttgcatggggtcgaatctctcgagtattagttttctacaaaacgcgtgtgcttgctgttgaaagactattatttatttatttatttatttattatgaaatgaatttagaaaagcaatttctgtcatggtatcgaacccttccttgactcaagtgcgctccctttaccaattggagtacatacttagacggagaagttgagtcaatgtgaatgaaggttaagttttctatttaaattaactttttattctttttattttgaaaattaatttaataaaaagcaatcggggaagggagattttgttttgacaaaattaaaacaatcggcttcacttaaaaatttacaacaaaaaatatacaatcttaaacatctcgaatctcgaaggcagcagagggactgagtaatgagtatcaaatagatgaaatgcttttctaaatatccggagagaataaatgggacatttttgttaaatataattcatcaaagaatcaacgaatcctaatctcaattcttattgatattatgcttcccaaaattccacacaaaaaataattttagcagttggccaacatagaacaatgttatagacttacagcccacggacaagcacaagcaggaagggaaataatcaagatacaattttgctctcaacgattaaaattaagagcatactgtatttaagaaaatattattgcacttggaaaaaggcactgaggggagaattgaaaaggaaaaaaaaaaaaagaggctaggacaaaaactattaatctttgctcttctctgagtatgtgttctgaggtagtgtagggcgtctctcagcaagaaaacgttttgtactctcaaggacaccaaagaatattgaaccacctatgccaatccatagtactctgggaccaataccctgcagcaaatatataatttataagcaccattttttttttttgccatgtagctgcaagcctcatttagatcatgctactttataccacacaaactacattacaatgtatggaggaaaacacagaaaacccttactttcaaaaaggcacgcggtccttcttccttaataatggtttgaacacagtcaacgattcccttatattggtttgcagttcccttgaagaggaaaataggaacttatgaatggcttgataattcgcactgaatattcttattgatttgcttctagattatccatatacataaggtatcgtatgtgcatggttgtatgtagatgaactgttgtaaaaacaagattaaaaaagggaaacaggattacagcttacttgaaccattaaccttgtcttgatgacatcgaggggggtagttatagctccagttagtgcacctacaagaaacaaggcagttaagtcacatttcaacgcaaggttagttggacttgcaaaatgcaataatgcttaacaaaacaaagcagtttatacctccaagaatccttactacccatgaacctattttctctccccctcaaaaaaatataaatagaaaattaaaaataatagaagctacaaatggttgggtgtaagcatatgttaggtaacagttgcccctgtctgaaattttggaggtgcaagtttcgcctactcaatcatgcagatacttttatataaaatgagtagcttattaccaaataaaacaataatcaattttattttgctattgcctattaagttctccaatgtaacaaacccaagagctttatgaagatatagaactggggatagcagattattcacattcttctcagtcacaaaactacaccactcaagcactcattccgtgatgtttgtgcccactttgtcctctgggagacataacatggtgattgtgattcactacacaagatgagtttgcataatctatggaagaaataagagttaaaaacgcatatcaatgtcatgaataagatatattataacacaatttatactcattatcataatttgttcttgatagcattcagtgggggcaagaataagtaatgcagtactttgacatgaaagcaccatgtaaatcaggaaacaaagaaataagattgagatactccccgtgagccccttttttggttcatttttaactgataaccccccaagtatttgatagagaaggcatgcaactggcaccttacaaacaaaattaactagatatatggtactaattgtaaacagtaaagcctatttgtgtcaaactaccatacaccttacaagattaattcacatggtgaggactgaggataaaaactgacttttaaatccctcgcacaaagaaaaaaaaaactcagcctaaagcataaagtcatcatagttatcagaaatgaaactcaatatgtatgtatatcctcatatttcttaatatatatatatatatatacttatctttgctgataaaaaaaaaaaaaaactctaaaatacatgtataacgatatgcccataatggcacacatttacctgcaaaagcaccaataattgcattttctggatcattcagatttcttcgtgcctatcaaaaaggaatgtaagttgcaccaatcatgaaatgaaatagaggagcaaacatcaccaatctgtctttcctttaataagtttagcctataaatatggattagtgcttgtattgaaaaaccatcaaatactgttcagttttcctcttcttgctgatatatctttttgttgctttcacccatgtcattgtcagattccctctccctggtcaagatttttttttaatatgtgaagtttgacaaacacaatacttgccattactacggtgaatccattgtacatcagactatacaatactaattcttcgtcaaagaaaactaaataataaatagtcattttcatcctaaagtttcaacgtataggaaggaaacctaaagtattttcaggctcaaaaatataacaagagaatgggaatggaaatttgtgccaggtaaacaaaaataccaaaacaagctctaaaacagatgaagatagaacttgagaatttaccgcaagcatatagcctaatcgaatctgctcatagatgcaaaattgaatagcatcaaagggtaaatccctcaacaaaaaagatccatacccctgtgatttcaaagatcaacaccaaagaaacattttagcatatcattgcagacatggagaataaaatttatcaaaaaatttaaaaggaagagatggtgaacttcatacagcataaaatcctttaaagccttccttagaagcaataaagcgaacagcaccagaagctgaagtaaactggccagtttgcagtcgttgcttgataacctgaggagcacgtaaaaatatgaaattgtccagtgaaaccgttttcaaccatgctaatgtcatttttacaaataagagaatttatttacctcagttggaacacgaatcaatgaagcagcaatgccccctatggcacctgcagtctaatgaaagtgaaaaacactgaaagattttatccccataagaatgaaaattttacatcaagagaagtgtatgccagcaacaaaagaatgataaaatagacagagcatcaactccaatacaagccaaataaatgccagaggcttcagaggaccataattggccagaattcagacttttgaaagcattaacaggtacttaatttacttaaattttcgtatgccaattgtaatttttggagaagagatgataattttgtttttctcctattcatatggagtcaggcaatcctagaatataaagtgggaatttgattaggaaatgtcaaccaatctgcaacaatttaggagaaaacaggagaaaaataagggataaaaaactgaaacttaattctgatctgaattggataatttagatcttattataattctaactaatcttcctaactatcaattcctaacatgaatttacaccaatatcttcatatcaatgtttatataagaagtatcttaccaaatgagtaaaagcactcaggtgttcaggaaatatcctcagcaatttctgctttataggttcataaactccaacaaataaagcagatgccctgcatatttaaaagcaacaaaaaggtgtgatggaaagaacctagatgtgattcatgaattcatatcttgataagcatgaaatgaaaacttgtgaaaatcacttcaatgaatttgtgaggttaaaaaaaactctttttagctttgaatatgcataacaataaataaatagttacttctaatgataatactctttcaaacaaaccctaaataaccttaatcagaaaactcaatatccagtcttggaaggatctatcaatctcttattccaaaggcaagtacataccagattatttatatcagaaacaaacaagccctgcttattccaaaaaattgagttaagtcacattttactaacaacactattgtttgacttcatgtctctacagtctacataggctcccttttctcaaggcatacttccagaaccacccacaaaaaggggcaatgctgaattccagccagaagaattacaatcccttagccacctctcttcataggatgcaaacatctctcaaaaaaaataaaaagatctttcttcgtcaaatgtactacataagaatatgttatttctcaaacatcttcggaaaaatgagagatagaaaccactgacaatgtgattttgcagttagaatttagaaattcatacaagttttcttttccttcaacaaataaccttcatacaaaatgcaagtctcttgagttagatcactgagcagaaattcaatgaatcatggaaataaatttactaagcatgccaacagctttctgatttctttcaaagatgattgggtttttcaaaatttctaattaacataaaaacctagaatgtttgaaacaacatgctatccatgaggttctcacggtaagacaccaacaaggttccctgccaatccggaataaaggcccttcaatattagtttttctcctccgcgagcagcctagggaaaaaaattatatcatcagcacattttatgtcaacacaacatactatggaaatacatgcatacacacacaaacacacataaaaagggtatagaattgtatggccagtggtcataaactaaagtatacccaaaattgccgtgaagaacacaaattaaatttttaacccacatttagcatattgaaaattttattcaaattcagaaaagtccattatgttatgtaaataaactaactaagtattccatacatatcaaatgcttgaaaaaacttttatagctttccaatttcctcattgttagatttcatcttaaaaccaattggcattaaatgaacttgaccgataagtacataaatcacacccatcaattgaggcaatcgacgtggaactttccaacacccccctccatattccctccaaaaagcacaaaagcaaacaaaatgggccattagaaatagactgggcctaactcacccccaaaaacttgttcaactatttgggccatattccttgccaatgtgagacatattaaatgccaaaataaaattttatggtatttctgtcaagaatcatgcctagctgcactgatgcaaagccttatcacttggcatcatattcaagatttcagcatcaaacagtaatcagtaaaatacacagaaaagcacaaccgttgatcttcattacaatttttgtcataaaaacctgcctgcagacgtgtttttattgtgtcgattgggtataaagctgtttcaacaacaactccagctgtacctcctgcaataacgccctctgcaaatttcatctagctcatcagaaagattgatatgtaataaacccatcaagtatatagtattgtctaccaacttagcaagaaggtaaaatactcttttagaggggcaaaatttcagtttttcacttcatatatgaagaattgggggatagcatcttagtgttggtccgccttctacttaacaaggccttaataattatttgcaaatcacagaagtgaatataagtaggcagtgaatattttatgttttctttccaaatcacagaaaaaacttggtaaacaaactaaacaggaattacaatacctactgaaatcatattttgctgcaatggaacaccaacactgataaaatttctttgctaggaataacacctaagaagatcttatacttaccaaataaagtgcgtaggaagtcaaatggcttttcatctcccatgctaactgatgcaaaagaatttttcagaagtaagttctgctttcttttcgtacaagtatctgcataaccgtatatccttccaaaatgagaagcgatagcacaaaccagcagcaaacagagtgctaaaataacacatgaacatgagactctcacccttcaccctacagatatatctgctaaatcatgcactaaaataacaaatatactaaccaataacaacttaagtttagatgtaaaaatgatattcccttttcgctgaccatcaataacatggacagtacaatccataattttcttactccctccccgaatataatcctaagtcccgacttataaatgttgaattaagaaaacctctggtttccaatggtgccaattgagtcaatatatcataaatcctcgtaacaaataagagcagtaaaaatcaaaattactaaagtgcatttctctagtctgaacatatacttgtatattgtgaaactaataagctcttcagtattctcatcaatagaataataatcctaactaaaagaaaaatgaaagaagaaaaatcacctcttacaccaaccataagtaattggccatcacaagttgaacagttgaactagaacctccacacaacccctaaccctaagtagctaggagtgataaacctcacatttataaattttcatataaatataatcccactaacctatgtcacaaattcaaaaacccatttatacaacacaactcacaaaatgcaaatgggttacccacctggtaatgaaatggcagagtcattaaccataacgggcagtgtaaagggacccattaaggcccaacgattccacctctaaccaaataacaaacaaactgaattggttagtatttaaccaacaaagcgtcaaattttgaaacagagaaacaaaaaaacgacaacaacagaggttgtttccaatattattgtgaagaaataagaatggttacctaagaagtgagaagagtgatagaagggaagtgaagagatgagagtagcggatagaagagcaggagtgtgcagaaacgagttgtctattttttatttgcccaataaattaaactatccgttaattcttgatgcaggcttgttttatttagtttatagtttaatttgcatctataatcagtaataatctatccataataataaattttcaaatccataaataaatttgcttctcgtgcttctcaaactttggaaatatttcataattatttacgaatcagattaaaattaatatatttttaaaaacaaacagagtaatacatttatttattattaatatagttggaacaaaaaatttatccaaaattaatttaatttaatttttaaaattaaaataaaattaattattctccaataattaatgttacacttttcttgaaataagaaacatgaataaagtatatatcttgtagatgtgtcatttaaaaatgcattatgtgtttgtttataattaacacacatttattgaatactacattattgattaatgttacacattaacaatatgtgttaagcacattattttttattttgtgacaagtgtaacacatgttatttgtcgatcacatttattacatatgtttgaaacaattccttaaatcttgaatatcttattgttaacttttaatttatattgttttaattgaattatataaattcatattaattgaaaaaacacaagaataagatgattaaaacaaaatatatagagtgagtcgaattaaaagttaaaacaagaataatcattctttagaagttagacatattcatatttatacatcaagaaaataagacacaagttagcattttaactctaaaacaattaatcaaaaagaaaatttagaaaagaaaaaaaaaaaaaaagacaaattgctcaatgtttcattgatttgttgttattgccattattttatgttgaatttcgtatttgctttatactcctaacttgctaaaggaaatgtacttttgatatttaaatatggtctattataattcatatacatcatgttattgatggtggaatgaaatagtaacatatctacaaacattatttcaggcattcactacattcttttttcctattcatggtcctatatatttatatataaaaaagtaaaagtgaaggtgttgatgtaatttcaatttttcgcttaataggaggttaacataataattttataattttatcatagcttattatttataggctaaaagtgtaatttgcagtgtatgttgctatcaaaaattaaatattttatttaaactaattacatatattgaagaattctttttttcacctgactttttttatattttatgaatttataatatttattatttattattttaaaattataacattttaaggtgacatataatatactatttaattaaataatttctttaaactaatttataaatgtactagcatttttatattttatgaatttataatatctattatattaaaaaaaattaaggtgacatacaatatactgtttaactaaatagtttatgttaaaaaaattatatatctaatgaattaaaaaaaatagttactacttaattatatatagttaattagaggaaatcaaaaatatttattttgatgacaaaatattgaattatatacttttaaatgtaccaatgatcatatctattttttaaatctattataatacaatgacaaggattgtgattgagatttaaatataccaatgatcatatgtaattaataattttattacgaaaacaaaatatattactggtttaatttgatttgatagccattaaattcttcaatcaaatataaatgcaaattttaaaacagttatattttgattaaattaaaattaaaaatttaatgttaatttttaaaattgatacgtaaccacaaaattaattcaaatacaaatgtctctcaaattaaaatttaatgttaatttgaagtaacatcaaatcgttgcactcaagatatatatatatatatatatatatatatatatatattttgaagatttattttttgttaccttagttttttatattttatatatgtataatacttattatttattatatcaaaattataatgttttaaggtgacatataatattctgtttagttaaatatttctttaagctatttttttatatctaatgagttaaaaaaataggtactaattgaattgtatataatttattacaggaaatcaaaatatttctaattgatatttacagttgataatataaaactataaatatatttttaaattgtgactaattgatacgtgcaatcgatagtatatataatttttttttttaaattgttattaatttatacgtgcaattggtccaagttaaaataagtaacaaaaaagtgatatattaaaattgtgtgttttgaaacaaatacgtgtaaaatgccattattcaatctacattatgtttaaagtttaaaccaattagtggcagcgcaaaaaaataattagtacaattatttcttaaattggtttaaaagttagagtcctatataataccattttgattacatactctatattttatctataactatcggttttctttcaaaaattttacatacaattttgttgtgaatacacattttttatattgcttcattgttatcatataaatataacatatatttatttttatttttttgcagttcaatgacgcctaaaatttcactcgttgaaaaaattaagcctacaaccatagaatatagattaagagtttgagttatcaaactatggaagcaaccggaatacaataaatctcatcagattaagattattaaaacaatactccttgacaaaaagttataaaaaatagtattcaacccttctttgttattaaaataacagtttatgacacggtaaaatcatttaaaaaaatttgtattttatgccccttttaacaaaaacaacttatttttataacattaaaaaaattatttttatatatacattttcctgttttatttaatttatgattgaattgaaaaaataaatgaataaccatttgtatggtaaaactgcctatttaatcattaatattttgtcccatatgtttcaaggattcaagtttaagttattgtaactattatttgagaaaattgttaatagtatttattattcatttatgaaacacaaaataatgattattttaagttgttagttagtcttattttatcatcaatttcatttgtcaaaataaatatgactcatcaaatattattatatgttgtcaaagtaggtataaaacaagacaaaaattaaaattctaaaaaaaaattactccccgagtaaaaaactagtataaatttaaatttacaacaaatgaactattcttatctatcatcactgatcctttgttcactaggcgaaaagtttttacataaaagttgtgaaaatcaatgtgaacccaattaaaatgcctcccacattttgcattattctgagaatgtttccactactgatgatagctatagggaaataacaatctccttttgatgggtcctttgatacaatggtggccagcccctcgaaatcacatgcctcaacactttgatcgtttatttgaaagtattgattgaaagcgtatgaagcattgccagatgcatccaatttttcacaagaacaaccagtacctaagcttgtgcaatcaccacccgcacaagcataacttaaaggtccatccaatgcactcttgttggcattacttttaaggacacaccatttgtgctcttggtaacgaaccccttttgctcctattggcattttttcttctcctttgccagaaaaatcaatagggaacttaggcttcccatcataacgaaaaataccccaatgacgctcaaagtcaccaggtgcgacactcttcatgttctcatcaaaaagagaaaataaataagtgttcaggggtccagggtgaagtggagtcccttttttgtttgccattttcttaaggaacccttggtagaacctgtttgcatttttattattggcctttttgtgaccatcagttggccatccaatttcacctacgcatattgacacattagggtgaccaatcttttttaatgaccaaacaagggtatctaagtttgcatcaaacatgttggtgtaatgtgcatttttgtcatcagtgcttttaccattaccttcaaagaacgcataatcctctggaaaatcttgattttgatatagactaaggaatggatatatgttaacaagaaatggtgacttcttttcatcaagaaacttcactatttgtttcatgacaccataaatgtcattgcggaaattaccatccgagggtttgtttgaactagactcgtaaacatcagcatttaaagccgtagtcacctttattttgtctcctaaaccagccttatcaatagccctttgaacattttccattgctggaaatgtgattcctacaaatgacccattgtaacttttcaagaatggctcatttccaacggatacgtatctgcaacaaaatagtgaatgaggatgaaaaaaaaatgatttcctaatagtaaatttgtgatatgttgttcatggaaattaaaagatttaattaatcgcttcatttttgtccatatacctaaaaactctaagctttagtttctatacaaataactcttacgttttctccaatttgtagtatttttactacaaaaaaagagctaacaacatggatgtcaaaaatagctcgtatatgaattactaattccgttcctatttaaaaattctaaaacttttttatatttgtttgtttctttgtataatatctaattcatatgcttcatgtattaattgtttttaaattaaaaatactcttaattaaaaaaaataagagacatgttatattattattcatttagaaaaaagataaacattaatgataattgtatttttataaaaatatataaatttaggataaatttattgttataactaaattaattatcattattttaatttggattataaataaaaacgaggataataaaacttaagagttttaggtataaggagtaaaactaaaaattggagcaagttaagtactaagtgattaactaaacctaaattaaaaatatggaaatagaataatgtgagtcttatgtgaaggaattgtatattcatatacacacacctgatgttgacccctccatcatgaatatgtttgctgacattttgtttgacccaatcttctgcattatcttggtctttggatagtttcttcaattgatcattgggaattccaaccatgacttcaatgtctgtgccagaaaaagcacttacagtccaagaatctgcatcaaaaagctttacctttttaattccattgtcctttagcaaattcaccacaatgggaggatccataggatgagatgctattgcaccccaattgacaccaataccagatacagcctctgctccttcaccgccttgcagctggcaatgagccagaaccaaaagcatacaaaacgcccacataaaggagaaacggtaaatattagtcaaagtaataaagaaaataagaaggttaattatcaagtgaaatatttgttaagattgaatgatttacatttgaaaaaacaaagtggatgttcctaatcctgtgtgtttaattagctatactgtctaaataaagcattaaatgagtattggttcttaagctacccgtgtaactaactatctatatttgtagatggtgtgtaatattctaaaactaatctagaatttccttttttaaatgattgtccattttatgttcgagaatatttatacatacgaacatatacttttttgacaaaattaatataaaactaaaaatgatttatttaaaaatataaatagaaaataattactagtatgcgatatatttgttgcgtaagtatataacttggatggatggtacatcagtgacttggataaaaattagagaaaaaagtaaccgagagaaatattaatatagtattttttaatataaacggcaaatattcctaacactcaaaatcaaaacaattaagcataccggttaaaattaaaatataaatataataaataaaatatataaaagatgattttttatgattaagatttttttaacttaaattttaatagaattatatcataagaatttaaaagatgattttatagatttatcaaatttggaaaattttcataaatttttaaaaaacattaaaactaaaaaatcaataaaaaataataaaaattgaattaaaaataaaactaatataatttttcaatttgaattgctgtataataatagctacaaacgaattgacttctccgtagtattacatggacaaatgtccaggtcgtagtgtccgagccatagaagcagcatatagcttcttattctctccccttaaatccacttgtaacatcctatagcttgaaatttgatgtcaacgtccatagacattatacaatatgtttctcttctacacacaagcaaagttgacgtgcatcccatgccatcatgattgatacggtattaaaacaaagttgcccacgcctgggtcttcgtcatatggcaatacgaatattgtattggttcaataattgaaatttgatgagattgtattctttgagaagaaagttatgaaaaacaaggaagaaataatgaattacatgtgattggagaaagaaaagtatgacaacgtaatgaaaaagaaagaaaaaaataaataattattttcatttttgaaaatataaatcattgataaatttatttttgaaaaataaaaattcaaattttaatttcaaaaaatgttataaatatatcaatatgtaaacttttgtttgtgtaagttgaatgaaatagtcgtacccaacacaaaaggaaggatgatgaaaatattataaaaataattgtcgatataattattaaatagattagaccaaaatatcaataattttttattggactaaaaaataattaacttttcattagactaatttgttagatcccaaaattcatttcatttaaagataaaatataattaatcttcatcttttctcctttttatcgttgcaaacataacattataataaatattttaaaaaagaggaaaataatcataagttaaaaaaatataataataaacataatattgattaataaacatttacaattttggtctaacttataaaaaatgataaatttagttaatccttataaaaattaagactcaatattatgtttattattatgtttgttatagtttatgtttgtttccctatattttttaagtgtttattgttctaacttatgtttgttttcctatattttaggtaaaatataatttaatttttatcatttctccatttttaagtgtttatattttacccttaaatgaaacaaaatttgagattttgtaaattagtctaatgaaaatttattgacattttggtttaatatattcagccatcatattgacaatcatttttgtaatattttcatttctctgtatcacttagactttatttcattaataataacatagaaaagttatcatagatgaatttttctcaattttttcattttcggatactaaaatttgaattttcattttttcaggacgaaattctatccattcaaaaataaaaataactatttaccaaaatagaaaatctataaaatttcaaagaatttgattgagattgtttaataaatattatttattataatatgaaattcattctaaaagataatctattgaaaaatttaatgattttgaataataaaagatctttttaagctatacataattttaattgaatatcacaaaatttttattatcatattctaaaattcttaattaaatactatattttttatattatttaaaaatcataattcaatacacaagacttttttatcaataaaaaatcttctaaaatccaaaatccaaaatgaatatacttccttaaaattgaataaattaattagacctattataagatgaagggcgctagggtagccatatttgtattggcagcttaacccctccgtaaaccctagtataactggaaagaagcagtcgctttgctgctctcaaccgaaattcctcagttcagtcgctgccgtcgtctcgtcgttttaccgcaggtctcatttcttgctcattattgtttcttccacctgaggccttttatcgtgcatgactctttattgactcagttacgattgtgctattagtgacagttcacaattcaattgtgaaataagaaatttgaaattctggaattgaaaacaatttcaattagacggtttattctttatttattctgttgttgatatttttggtgtgatatggtgacttgtgagaacttaaattttgtagcagaagaatgagaaagaaagttgacgagcgaatcagaattttaattgaaaatggcgtcagatcaaggcataggtcaatgttcataatcattggcgacaagtcccgtgaccaggtctttttatattataggcccctctctatttgaatcattttgggaactccatttaatggaaaagagttaaagagtagtgcaatttgagtgcttaatgcggtctatactgtgtgcagattgtaaatcttcactacatgcttagcaaggcacagattaagtccagaccaactgtgttatggtgttacaaggacaagcttgaactaagcaggttctgtataaaatcaatgaaactgtcttgtgcgaataaactttgtttgagttattctgaatgagtttcactcgtgcttgattataaatgtgctaatgcagtcacaagaaaaagcgtagcaagcagattaaaaaattggtgcagaggggtctctacgatccggagaaaggtgattcgtttgaattgtttgtggcaagtgggggattaacttattgtttatacaaggattcagaaagagttcttggcaatacctttggcatgtgtgtgcttcaggtatcacacttccttctagctcaatttttgtgcagttgtgctttctaggctgtgtttctttcctttttacaagatagataaatttttccatcatcttcccatttaggattttgaggcgttgacacctaatctcctagcaagaacaatagagacagtggagggaggagggctggttgttttgctgcttcgttctctatcctcgctgaccagtctgtacaccatggtgatggtatgaacatagattcatcagtgttgatattcttgtttttttttttttcttttttaattttcaattcatttggctaattataagtgttgttttaagctgtagttggtgctcccttcttttgatgatatttgagccctgtgaccaggactttgatttcaggataatcattttttgtttgttttctgcattgcatttattgaagttcatagactttcatgaaatattagacatccttctcataaaatctcgttttataaaaaggggtattggtcattaattgagttagttgtgttagctaatggtttctttacatgcattagaaatggatttgatatctctcttgactcgagttgattctctgtattctatttatgttgtttcctttattttcttttatttattattcttgttggaggatttcttgtcctggttagttgttaaagttattttatttcctttttcttaataaattcattttatataaaacatatacggtaaatttagccataacatgatatctaagttagcatacctaatgttgaaaaaataaaaataaaagaatggaaagaactactgttagataatagaataaagaaacacaagaaaagaggatttcttgaaagagaatctaaaagcacaaaatctagaacaagaaaggcacatcaactaagtagttaactgactttaaaatctatatatttcctctctaaatacacacgagctggtgagctacataatgaggctaagtagacctctgtatcccacaaatattataaagtttatgcatgaaaaacttctagtatttctgtccatgcacaagcaccatataacgaaataagacattgcacgccaacttgtatcccttgttactactccccaccttggtaattttttttcatcgttttgaattataaaaacacataaggaatcagatttgtggtgcatataagagacacccccaaaagttctttctgtgaagaacaacttctctgcaagcgaaaacttccactagctttagtccatttctcaactagaatatttctcatttttgttaaatccctaacctataattgttttaaaatgcacacacacacacacatatatcatgaaggatacatggccctatatgtttgatcagggcttcagtaaaataaatgtattgtatgtgagaagtaaatattgctcctaaaaatagttatatttgttggactctagtaaaaatgattgcattgttctcattctcctagcacttttcatggaagcctgaaaaccagaaatttatatttctatgattaagtagatgagccattgcttaccatgctacttttctgttaaaagtctcattaaattcaacttgcatgttgattgctgattgcaggatgtccatgatagatttcgaactgaatcccattccgaggctgctgggcgctttaatgagcggttcttattatcacttgcttcttgcaaggcatgtgtggtcatggatgatgaactgaatatattaccaatttcatctcacataaggtctattaccccagttcctgttaaagaggtactttcattacatcctcaactaaatatttcttttttccttttctttttcgatggggtttgcatatagttttgggttttaatgcatgaaagacctaatgccaaagtgagcataagtgcaaaagaaatcatcttttttataaatatttttgctggttttacatctgacttaaaattaaatatgtaatgtgtcttcattgatgtttctgaagattctggtgcaaacaggtccttttgcctccctcaagaatctggagaaatagtgttcctacttcctatatgtattgttcagatatttgtacttgtaaagatgtaggggagagataatacagataggaagatgaaatttggaagagactagagagagtaattctgtaatgggatgatctgtatagcataacctccctgtatgtgtgtgtgtatatactacatctggtcctatatataagcaatatagtacaaatcatcaagaccaaggaaagtgttggtcacatttaatactaccataaatttaaattttattccaaaagtgccctaagtttaaatgttgtaagtgatggtttcatttaatattaatactcatagtcgaatgagtgggtttctagtaaatagagttaaccataaattaagggtataaaagacatttaactctgaataagttttaaaactggtcattgttgctcctaattaggaccaaagaaaaataccatttgttgcttatatataggacccgaggtagtattatatactactagtactaattaggagaaataagtcttgcatcatatttaaggcggatttccaaaaagcatacgattcagtaagttgggatttcattttgtacatgctggggaggttgggtttcccacctaaatggataacatggatcaaaggatgcttatcatcagcatctatatccatactggttaatggcagtcctacttcagaatttcagcctcaaaggggaatccgacaaggagatccattggcccctttcttgttcaatattgcggcagaaggcttaacgggaatgctaagacaggctcaagctaacaacctgtttgaaggcttcaaggtgggaaatcaggatacagaagtatccattctacaatacgcagacgacacgatcttttttggggaagcatctaaccaaaatgtgaaagcattaaaggtattgttgaaaggttttgagatggcttcgggtctgaagataaactgtaataaaagtaatcttgctgtctttgggagagatgcacaatggatttctgctgctgccaatattcttaattgtggggtgatgtctgtaccgtttatctatttaggtattcctttaggggcgaatccgaggcgggcttcaatatggggaaatattatcagaaaatgtgacagaaaactggctttgtggaaacacaaactcctatcttttgggggaaggctaaccttaattaaagctgttttaaattcgatccctattttcttcttttcttttttcagggttccgctacaagttattatcaaattggaaaggttgcagaggagatttctgtggggctctaatttggaacaaaacaaaatcccatgggtgaaatgggaaacaatctgtttacctaaggagaaaggagggctgggcataaaaaatttaaggcttttcaatcaggccttgttggggaaatggggctgggacttatttcatcatccgaaagctttgtgggctcaaattgttgaatccaagtacgggggctggaggaacctgcagacttcatccaggatatcaacggcgtcaacctggtggagggatttggccgtggtttttggatctaatcagatcgatggatggttttttggtagccttaaatggaatatagggaatggtagtaagatcctattttgggaggacccgtggaaggatgataggattccgttgaaagacaaatatcctagactctatcagctatctaaacaacaaacaaagcacattcagcaattgggttatcaatatcaacatgcatgggaatggcaactactatggaggagaccatttagggacactgaagttcaggcggttatagaatttcttgaagacattcaggtaacgccaatgcaccagcaacaagcagattcttggagatggactcacgataccagcggcttgtattcggtgaaaagtgcatacaacatgctttcagaggagggcaacttatatcctcaagaggaagtgttcatcaacctttggaagctgaaaatccctttgaaagtagcatgcttcgtttggcgacttttgaaggacagattacctacaaggagcaaccttaggagaaggaatatagtcacacttgacactctctgtcctttctgcaacacatcggatgaggatgcttcacatctatttttgtcttgcccctgtatcttacctctatggtgggagtcatgggcctgggttggaattagtggagtattttcatccgatccaaaggaattttttacacaatcatcctttggtcatcttacagggaaagctctatctaggtggcttacttggtgggcagcattaacatggtgtatttggaaccatagaaatcagattctctttcaaaatgcatcttttaacggacacaaattgatggaagatgctattttcttctgctggtcttggctgaggaatttagaggatggttttgacttctcttttcatcattggtccagcaatctaaaacagtttttttatctttggggaggggctaactcattggatgtagttattttgtactttgtgattctcgaatctgtcagaacttagatggctttgatagaaacccaccaaagttctgaatttattcacatgttttgtatcttcaacagtactccttgtactgtttcctatccctttttttttatatatatatacatatctatttttgctgatcaaaaaaaaaaaaaaaaaaaaaaatatactactagtactaggttaaggatgcagtataaagtacatctagactctgcccacctactctcaagtctccataactcttaaaaatactgattaattttcactcttgatcttccattgggatgcaatattccttatatttagtgtcagatgcttacttgttgctgataaaaaaaaaagatgcttgttgttgaaaacactatcatgataattgttggagttaatattttctaatttgtggtgttgtttgtactttttcatatagttagaaatttcgtaaattttggtctttgatatttgtataattgctagtcttacactctattctaactacatctaattgtagcatgggcttgcaattttttaccaaagccatttaaactatatgtaatggtttgtctctgaattgatgctgtaggactctgacgaactctcagaagcagaacaggacctgaagaaccttaaagaacaactaaatgaagatttccctgtggggcctttgatcaagaagtgttgcacattggaccaggtaggtttgtttacctcaactttgcattttctactttgaccaaccaaattggtttttgggtggtggatgcaagcaagttttatatgattttggttaatagggaaaagctgttgtgacatttctggattcaattttggacaagacacttcgtagtactgttgcattattggctgctcgtggtcgtgggaaatcagctgctcttggcttatcagttgctggagctatagctgttgggtactgtgccttctggacagatatatatttatatggacaactatacttttagtatcttatagaaaattctgtgtgtaggtattcaaatatctttgtgactgcacccagccctgagaatttaaaaaccttgtttgactttatatgcaaaggttttgatgctcttgactacaaggtactagttctctcccttgttgacagatataacccttattggttaatttatttggacaaatcaagtttcacatcggctagagataatgctaagaaagaatatataagtgggagacaacccttaccttataagccagttttgtagggttgggttaggctcaaatccaaatgctaagatggtattagagcatatcctgaatccattatgagtcacctaccatattatctacacaccaagcccaaaagtgctgagtgtgaggtgtattgtgaaaaatccaagtcccacatcagctagagatagtgccaagacaattaatatggatttagtcataaaaagttctaaagatggcaactgggcactttaactttggtaattacgtaagcaaaagttccaaggatggcaactaggcagtttaattaagtaaccactggcatttatatttgatttctatatggttcattacccatcaaaatcataatgtagtgcatatttggattaatttatctgcacaaaagtgaagttaaaaaagggtgacccagtacacccttgctaaatgtaccagctttttttcaaacagtttttatccttaaaaaaagccttttatcacaatttaatcatttccaaaatacattttaagagtgctactgtttccaatgtcaataggaacatattgattttgatgtggtgaaaagtgtgaatcctgagttcaagaaagctactgtaaggatcaatatttacaagcaccacagacagacaattcaggtaagttcattgaaccttttgcattaattactgttaagggaatttactgttgttgtgaggttaggagttaattctggacttattttccatcgtaattcaatcagtatatactgccacatgagcatgaaaagctttcacaagttgaactgttggttgttgatgaagcagctgctattccactgccagttgtgaagtctttgctgggcccatatctggtcttcctgtcttctactgttaatgggtattagtaatgtttgttattggtgaaattttccatatatcatgccaaatgcatttttttgttttttttgtaaacaattatgattttttttaactcattagtcaattttatgtctcctcatgtggcttaattactgacgattttttttaactcattgaaagttatgaaggtactgggcgctctttatcactaaaacttttgcagcagttggaagagcaaagccatgtgtctgctaagagcacaaaggacactggtatttatttgtgctcagagcttttagaagtcagtttaaataaataatgtgcatgtcatgtgctgttttgtacggaaacacagtctaagtgggttatgaaattaagataattggttttcaatgttctgttaaatgattgtaatacaatgttttcaaggtccatgtgcaatattgctaaatcttgaattatatgtttcaggtcgtctgtttaagaaaatagaattgagtgaatccatcagatatgcttctggggatcccattgaaagctggcttaactctctactttgcttagatgtttcaaacgccatccctaatattagcaggttatatcaaaagcttatttcatatttcctgggaaaatgagaccattttttctctatctccatttactgtttttctcctgaaatcaggttacctccacccagtgagtgcgatttatactatgttaatcgggatacgctcttctcctatcacagagatagtgaattatttttgcaggtaaagtcagattgatctgtttatgtagggtggtttgtgattgatattttaatgtgatcagatgctgtactaaaatattctattattgcagcgaatgatggccttatatgttgcatctcattacaagaattctccaaatgatttgcaactgatggcggatgctccagcacaccacttatttgtgctgcttggtataatcatttttctttcttgttattcttcttttgttccattttttaaattaatatcactcaaattagtcttataataatatttgtgtgacaggacctgttgatgaatcaaagaatcaacttcctgatattttgtgtgtcatccaggtttgcatctttagtataaatcaccctatttttctgctgctttttttgcatatggcctgtctcattggcttccatgatggggcttggctcatctgttttgtcagaacctgttatgtccaattaatggtaattttttttttggtttatttcacactgtttgattatgatgggggaaattgttgacttgtttcttgtgatgtgacccattatgaagcaacaagcatacaacatattgtggaagccgtgggaaacagttattttgatattgatattatctacagattgagacactatctttatattggtttataattagaatgcttgaagctttggggttctctttgtttaatattgatgcttgatagcacatatcagtttttttaatcagatatgtgaagctgctgtatatgcttgagttctgatttatgcctccgctttatcctgctgctcaaaatttgtattggagcagtaattacagtatttcaaatttatggtggttgcatgatccttcattcaaccgaaacttttgccaccacctgctcctttttttttatatatagttttgcttaatgttagctttaaatttgttattatttatggttatagtacagatgattatgtttactatcccgtcttctgcttgtcttttctttatgacttcctatattccgcaactttgatttacaggtttcccttgaggggcagatttctcgtaagtcagcaatccaaagtttgactgatggtcatcaaccttttggagatcaaattccatggaaattctgtgagcaattccgagatacagttttcccctcactttctggtgctcgtattgtacgcatagcggcacacccaagtgccatgagggtaacttttattttctgctctggcatatggtttaaccagattctgccaaagttgtaacttatttcttttatttcagcttggatatggttcacaagcagttgaacttttaattcggtgagtgcatggttgctttcttgtttcaattggagtaatgttcattttatcttttcctttttacacaaggttccatgagcatagaatgctcttcaaaagtttttaatttaatatttgatttggtttgggaggagccttggttcaacatgatagaaaatatctgatatttgtgtgtacagtcaattattgttataatcaagccttattattaggatttacattattgtagttgatgcaatgtagtgactctatttgacacactctttatgagtggctgaaatttattagaaatcaccaattttggtgggccccacttctcatttaatgagacttggtttagaaatgggacccaccaagtttggtgatttccaataaatttcaaccaatctggaaaaagtattagaaagagtgtcggagagagtatcgctagcattcctctaaatatattcttgtgtggtctgatcatattacacagaattccagcatatgctgttttctagtgtaagcccactgccatgggacctgatggccttaggttctagtcacatcaacctctatatttatggggtaagcctatgcactttttaccatcttagaccccacaatgttgggagcatcatgcacagggctgccaaagaaatgatttggcttgtgtatgagttgtcctgttcattaaacgttgctttaagagaagctataatttggtgcttcattatattgtctttttttatatatgccaaaatgttaaatgcagaacatcatcaattaatcatttaaatcactgtctgcagctactatgaaggacaacttacttgtatctctgagattgatgtcgaagataaagtgcaggccccacgacttagagttacggaagctgcagagaatgtatgttaccactgaaagtccctttttgaataggtttagttagttgtgttcataaaagtatctgaaagttatgtatattatgatggtatttgaattatctaagattccattcagtctagctgactggaatctgtaagatcaagattgaaccagtaaagacagcattttcataattgagaaaatgtcattcgtactagttatattaagcacatttccaaaaaaatgacttaaccttagagtaggctttggaattcaaatagttttatcaagatggagttggtttggttcttcaatttttttatgctgcttttcttttcaatcagctttgacatgcactgcccagcttttggaactatgggcttttttacatgggagattatattctcttgctcttgataaaataaatgtgatttaattactgttgtcagttgatactctctgcataaacttacgaagtgtctgatattcatgctaatgatgctatggtcctaatttcccttttgtagcattcatggtgtctgacgtggaatatatcttttaattgtatattttacttttttttccaaaggaagatgaaatattttcttgcttctttcactggctttgtttgatttcatagagaaagacaaacattacttttagacaggtccttggtttcttttagctttaagatattaatgactgaattcaaacatacagtgcagggtgcatttgagcaagaatggtaggctatatttgatttgttattttctgtgccttttaactcttaacgatttatgtttatctttttcaaatatgctttacgtttttcatgatactactatggaatatggattcaggtttcactacttgaagaaaatataaaacctagaacagatcttcctcatttactagtacatctgcgtgaaaggcagccagagaagctccattacattggtgtctcctttgggctaactttggaccttttacgcttttggaggaaacataaatttgctcctttctacattagccagattccagttaagctttattttttgttcaagcagtagataacactgaatttatttttacaagtaattaacatggttttcaacttgatagaatagtgtgacgggtgagcatacatgcatgatcctgaaacccctaaacaatgatgaaattgaagctgatggatcaaatcagctgggcttttttagtccattttaccaaggtgggttcatcttcctatgctgttgtgatctttgtgtttgatatttatgattcattttgtgaatggttgatgatttagttcgctacttgtagattttagacaaagatttgctaaacttcttgcttccacttttcgttgcatggaatacaagcttgctttgaggttagtattaagaatttagtagttcactgttataattattagatagtgatttggatattttggagttcattgaattctagggaactaggattatgtgcatattgattaataagattttccacatctttattttatcattttaataaaagaagtattggtagaggagaagatgaagtgcaaagcagagtaaccgaacagacaaaacaaaagacttgaagaaaaagaacttaatatttcagtgtatttagaatacaagctctaatccccgtttttataggctaaatggctgatgctaattaagggaaataggggaaaacataagaaaggaaataggaaaaatattaaagattcaattagatatttatttaatcctaataatatcaaagatatttactagagtccccctcctcaagttggtaaatgaatatcagttattcccaacttcctagtaagttcttggaatcccattgtagggagctccttgtgaatatatttgccaattggagccccaaagggatgtaaggtgtagttataagactgcatctataagtgaatattttaaaactttagggatttagagtttctttaactctaggatacatccctcatttacatctctatttttctaaatgcatattatcatgataatttatccagcataatagatcccaaaatcaatttcaagtgccaagaccctacggagaccacatctgataaatgtctgcagtcggtcagaggttatttatcaccacatgatatgaagcgattagaggcatatgttgacaacctggctgactttcatctggtaagagctcaagtgatggatatgataccataccaatcagtttttctagatggtttcttgaagatgacatctaataccacttagttcctatttataagacccaaattagaagagatgttttttcctttttataagacttaatccataatgtctcttgcattaattattttttgattaaaacatctccaagacaaatttattgttataaactaaattaacaaattttctaatcctaatgaattaggtaattgtgtcttatacataagaacgaaggttgtactattttggtaattgaaaattgttgttctctactcctaatggctctcacttccttggtaaaagcctaaaaggcgacctctttttcaattttcaaagtattgctcccaccccacccccacccaaaaagtgccttagtttttttttgccctaatatatttttacatagcgtaattttcatttaatttgacattgttaaagtgagtaataattttttatcggataaactgcagtggccagacaaattaaatgcacatttacgtgattttgcatgacatgtatggtcatcaatatgtgagaatcatgatgagcaacttaaatggcatttaagatacttctgtgtggtgaactgatgtaatctcaagcaccttgcactatgtcactgctaaagttgtgatgtaactgtgccaagcatagtccattgaaataacataattctgattgggtgtgcaaaaaccagttccataaaaaaaccaaacgtaactggttttgaatcgttttaaccgattcagttttatatccaaatagttgaagtgatttagaaaattggttctgaaccaaattgattttgaaccaattttaaacaggttctaagaactgaactggttccggactattttttcttataaaaaaattatccaggtgaaaattagttcggttaactaaaccgattttttagaaacaatttggttaactgaactggtttttcataacagtgtagttatttttttcaaactggtttagtttcagttcggttacaatccggtttggtccgaaccatttttttttttgcacatccctaattctgattatctgttaaagaaatttgggtgcttttaagtttgatcttgaccctttttgtcttttacagattttagatttggttccaacccttacacatctgtacttccaagaaaagcttccagttacattgtcgtatgctcaagcttctgtgttactctgcattggtctgcagaatcagaacatttcatacattgaggtctgtttatcaacttattaatttgttagttgtaatactacactcagatgacgatatagcacctgatgccttgtacatcaaagcaataaggataacataaagctgaatcccattaagttaatttatatgcacttatgttagtgtaattttttgtacagatatcaaataggagttcgctttgctgccacattataataatgaataggatgatgtggtgataggatgaattcctattgaataaaaacagttttatattgattgtgcatataaatcaaactcaaatgctattaccagatatacaaaacaaaatccttatctcactaggtgaggttggctacctggatcatgtgttttagaaaatatactcagccttcttttgaaatttatcatgcattggtcagtttatcatgatacagacagtgttatcaatagcagaacatgatggaaggctgaaattctgccatataagcacaccattgcagtttatggtactgcagtggaggcctcttaacaaattggctatggcggttggcaaaaaattcgtcacaccattccgccatggctgttatttaacaacactggatacacattttctatcagatcaacgagtcagtctaaaattcgttgcatgattttgtttgaggtttgagtttgcctgtttgatatcttcctccattggtgccttttcaaaaagatggaatcacattctcttatatgccctttttttaacagggacaaacgaatttggaaaggcaaacaatattgtctctatttataaaggttatgaagaagttctacaaatatctagatggccttgcatccaaggagattgaatcaaccttgccaagactgaaagaagtaagtttcttaatgacaatttaacttgtttattccatggtatggtgctttcagtagaattcatagaaatttttggttagtgaactcctgctgcagtgtgtttaggaacacattctaatttgtgcttccttttttatcattttactaatcttgcacctcttctttttccttctcatctgggttatgttctgttttgtccctagattgtcatggaacctcatagtgtctctctggacgaagatctcaatagtgcagctaaacaagttgaggtatgtgccttcaccttttgttgttttttgtttttgtcaaagatccctaccccgaatcccatctttgcttgtttttacctccggttttcatagctcatattttaaatgattgtcactggataggatgacatgaaatcaaaagcagaagcaccctttactcccgaattgctccagcagtatgccattgaagatggagaatctggctttgagactgttttacaaaataatggtggaaaaatacccacaggtggtcttattagcgtgaaatccagcaaagtgcagcatgaaaaggagaagggaagccataagagtgacagaaagcggagtaaagataaccacaaccataaatcaagcaaaaggaaaagatcgttgaattgaccatgggaagaaccagccaagataaaactatgattatttcagggattgttggtcctttttgaacgcccatattgatataattttaccagccctttttggcggcttaagaggatagatgaccacaatttctagttttttctccttgtggacaactacatcagtgctatatatatatatatatatatatatatatatatatatatatatatatatatgggtttttcctagaaaatgtatattataagagacagatctgacggtcttgtttcaacattttttagttgcaaattcagagacatgtaaacgggactctctctctctctctctctgtgcgtgtcttacaaaaacacactgaaattgagatacgagatgagtgtgtccacaacacaacacagcattaacattaacgattaaccatttaaccttaaccaaccattgcattgataagcaatgagtagcttagaacttagaagctgctaccaatcacaaaactcgtacattctaattttttaaaaacaatcgtaaaagtacaatatatcactcattttaattcaaaattaaataattgtataatttactaaaataacaaccaatacagcttaagaattaaaataaaatataataatttattttaagttttttgacatttataaaaagaaatataatgattcgtgattttcatgaactaaaatgataatttattcaaaataatttcacttatatagatagtaactacatttaattttcatatatatcaagacaaaaaaacaaaaacttaattctttttaccccaatgcaatcatacaccacatgaaccccctattaaaaatttacataagaaaattatatttaaattgtcttaaaacaattccaattttcaaacactcgacatttaacaaatcactaatccttctaaataatacaatcaccataacgtcaattgtacacaccccccaggctccacgatgtttctttgaaaacttcccacgatacttgttactagacaattttcatcaacttcttatttagaatgttgcgcaaaaaaaaaaaaaaaaaaaatctgtacatgtaaatgtaatctttccaatgtaacaataaattgtataaaaaaacacgagctatatattcatgtcatattttaagcgacatcatatgtaaagaaataagttcaattttctttcaaatgggagtcataatccttccagcatcatacctctgccaaagaatcacaatttgaactactcagcatagcactctaagaatctgtaaacctgcaatgttcataacttcatatccataaagattatgaaacaaaatctgaattgatcgcgtacttcttttagggtacaaggaacagttcattttaaatgttgtaagattgttgccagggtcgagaatttcaattaatcgatgcatgggatccaatgggaacagccataatatcaagaataaatacttgggaaacatgacaagaaaaatttagaaaatttgatcgcctcaacttccagtttaacatggaatttgaaatacaaaaagaccttgaaaaaactcaagaatcttcaaactggcatcaatgttgcacttcaaaccagtggtgtctacttattcaacacagcttcatcattatccaaaatgcaataatttctagtgtgcaaaaacatccttaagacatttaaaggaagtttctgatgtccaaagttttgacatcgactgattcaggctcatccttgaattcctccctgaaatggcaaaaaagacaaagcaaaatcaatcctacaatggtttaaaatttctatcctattgcacatagaaacccgagtggaaaggaattctaaaagtagaggagaaaacagaagtccaatttccttctcttggacagtgttatattcatacgttcaaagttcaaaagccataaacctacagtgcaaggaaaggccaagcatcatctttggactttggacttgggagttaaaattaagcagaaaagaaaaggtaattattatgtgcttatcaacgatgttctgggtccaaaagcacagagaattggggagaagggaaaatacaagagcaagatatgatatcattagtagtacctcttcttttgagtttccattgcctcaagagcatccttcttcagctcctccagttgtgctttggctactttaatttctagctcctcttcatacttcggtagatcttccttttgaattccaagtctaaggtagaccaccaaaggaagaaaaagggggggagaccaaaaaaagagagaaagtaattacaacccagtaatttattgcgctcaactgaagagaataaaaacacttcagaattctcaccagaaaattaggaatttaaacaaccaaatggaatgcccaatgaataaaactaaacactgtgatgcaagctttttttttttgctcagcaaaaatatatatgtattatataaaagagagaaatacaagtataaaatgaaaatatacagcctatcagacagaacagaccataaaccacggctatctaatacaagcagggacctggattggatagcctaagatctggctgaagataggtccaaaaccccaacagataggctgcaagcttacgacaaagtggagaaaagctataagcttggtggagggttagacctgttattatctctatgttccatacgatccctttttagttcctatcctcttcatttcccccctccttctttcacccttcttttcttttatcttattttcttttcttttgtcttatttcccctttttcttcccctaacccttccttttttccccccttcaactttctcgtatctatttttgggttcatctaccaccgatcccaattaacaaagacaaaacttcaaaaattagatgtcaactagaatgcttccttctatttaataaaaattcctcctctatatttttatagcaaaaatccttaccctatacaccatctaatgaaatgagcactttcccatataatgagtgtgtaaatgccactcaaccatataaaatattgataaaatacccaacaattagaagtaattgcatgcttacattccatgacaatgatgatgaaataaaatcatcatggaaacagattcaaaagctagaattagatgtcacataatattagctgaagccaacatatcaaaaatatatcaagggatatgagcttacttcttattaatcttatcaaactctgccaagagaaggtccattcctttcttatcatttctcagtaaaggtttttttaaatccttttcaactttgtccaatgcatctatcatcagagcctctgcaccaagatcatctgtaagacctctcctgttaaaaaaatgaacatataaatatatgtgctcatgtaacaagaacccaacacatcctgaagcaagggatgcaatatgttgccttttatctcaattggaacatatgtgtacacaagtataaaaagacaactattaggtgaaaataaatcccaataataatttaggctagtcacaatttgcagaaagaacaaagccattggcaatttttagaactggaggtttaaaacaaaagcaaagccaacatggttcatggaattgaaaaaatcattttacatatcacaaaataatgaagctggtataaatgaaaaagtaaaagggcacactttacatatcaatatcacatctagttacaaaatgaagagagtagagagaatagatcatcatcacacacttgactcttatttccttcaaagtccgaagataggtcctagcatctggaatatcctgtgtctccatttcaatggtggatagtatgtcttgggactccgacaataagcttgccctgtagaatgcacaaaagattgtaggcataacataattaaaacaacaaaatattgagaagaaatagtcatataaaaagaataagttaaagcagaatctcacttctctctaactgttttcatgacctttgcataatgagaaacagcagctggatcttctgggtcaatggtgatcttctccttctttaatattcctatggcggtctcaaatttgttcttcacctccacaaaaatgttcttcagcatctcttttcccattcaatcaaagaatatgttgtcaggaagcaacataaaaataacaatatttccattgaagatcaaaatgcatattttaaaactatacaactgtataagagaactcacggtctcccttaagggcaggaggggcagattctttagcaaagtgacgaactggaatagcatgctccttttgcagaagtatttgactgccatagatctgtaagaaaatgaagaaaaatgaacacatgaaaaaaaaaataaaatcagtggataaaccacaaacatcatcactttctaattaataaacaaaacttatgcatattaacgaccatggaaacatgagtttcatatcattcattttcacacaccattccgcaactcaatatgagataaatcacaaacatcgtcacttttaaattaataaaccaaatttatgcatattcaccatcattaaaacacgagtttcatatgattcatttcaacacaatatgacacataagtaacaagcaccaagacattttttttatcgggtggccataactgatgatgatcagggatcacaaatccaaacgcattgactactcctagggtgcaaacaagcgaaaaacgtaatttccccaaacaatagaatcagcgaagaaagaaaaacctaattgaccaaaagaaatggataaacgaaatgttaaccctcgaaatgtaacgaatattatctctttttcgagtaattttgattttaaattatcgggatagacaatcagatatcgctagatgtattgaaagcaatgcagatcccgagattacaacaacaaaatcaaaagtgagaacgtgaaaagaagaaaaaaaacgccatgaagaattgaagtcgacagagaagaaattggtatgagagataccaatttggatttggaaaagagacgagaagagagtgccatgagtgacgaatattgagctggctcacgaatgcgtgcgtagttagggcttcttcgtttcactttggtaattctctctcaccctaatgaaatgaaatgagtttcacaggaatcacaaagggagtaatcaggtagggtaccccagttctggtgaatgggcttcgccttatatctcagccgttggatatacctcccaagtggtgctctcgctcttttatacaaagaaatgtttttaattttaatatattataatgttgaatgtgaaatttttacactgttaattatttaagatgtaagttttaaaataattattacaaaaattaaaaatcttataatttattattgaatatcagtccaaaaaatattcttttatcgtaaatacattctaattagattaataaaaaattcgtaaaagtgttatcattcatttatacccaaaaattaataataacacaatgacaaacataatcactacaataacagtacattatatatttccaaatttaataggtattatttttaaatttagcataatctggttaatgttgacagttccagtatattaacattttctgtataaaaatagattaaaacattttattaaagaaaaaataatatattttcaaaattcttttatctctttttttttaatcagcaaattttcttaaatcttagttaatgacagacttttgatacttgtttgaaatttaacatcaggtatttattatttatttattataattattaattttattttacatgttgaatgttgttaaaactacttttcatatttatttttttataatttgacgaaaaataccatatgaaaatcaaatggcaaccactcccatgtcacaatttttatttttatgaaattttgaataaacgtcaattaacgaggtcattttccatatgaaaaaaaaagttaagaaatatgaaaagtaatttgtacaattttttaataaacattttttatagtatggcgtatttagacatttcgcttcaataggtactggtagatattgcctaaaatcaaataaaaacattatactatttattaaattgaatgttcataattgctttgacttttataccaatatgtcatttagattatgtaatcaaattaacttttatagtgaatattattaagacaaatgttaactaatgtttttagtgcactggttaaaaaaatttaaaataaaaataattttattaatatgcataaaattatattattcataattttttttcttataatttttacaataatttcttttttaattctttaattaatacctttaagagtactgatttgtaagatcctattattaaaagaatcaagggaactagggaagtcaggaatcccttaactgatacatttgggtcaaaaaagttaattgctgtaaataaacataattagcaacttcgatgtccaaaaagtggctcctgtggaagcattaatgttgtctttaatcatgccttcacatattaaatgtgacaaaacatctcatgttatatgatacagatcctataaacatgtacctttagaaaattattagttaagaaattaataaataacttttaggatgttgaaaaaaagtggtgagaatatatcattaatgtatttcaataatttgtagtgttctaaaaacaacttgttaacattctccttgtgatattcctgaaaaatacagcagtttttatccaatttctgccatacttcaacaatcagcagttactttctgctatgcttgaattagtagaagaggatagaatgaaaggatatgtaaaatgaagtgaaaattagtgggatctatttcatcgtttatcttcacttttctttctcgctccaatttgggagtaacaagatggaattgaaattgtttcattccatcataacaatccaaacagtgatgggatgaaggctttattccattacattttagttcattccatttcattcctctcgttccatcaattcaaaaatgcattaaccatgaacgccataataaacagatttccgtaaacaaattgaaaagatgaatgactaatgatgcagcgaaacaaatacaaacagaatacaaataacaagcattcagtacatttttttttgacaatgcatataaatatatttatgttagtaataaactattgtctataaacatgattctacatttcggcggcaaaggatttaccacatccacatgtctgtgtcgcgttaggattcttgaaagagaagcctcccccaatcagagcatcactataatctaattgcatgccaaatatgaagagtagactcttaggatcacaaactgcagaaataaatggagaagtcaaaatcatgcagtggcttatggtttaagacttgaacaaaaacatcaagcgctgcagtcaatacattgatcaaagaaatatatagaggaaagtctccaataccataaacaccatatacatgcatcatttttgttttggcgtaaggtgcaagacagtttgctcactgttctttctcttatttaccaaatacagtaagcttaatactaatccaagtgcgatcttaacagtaataataataacaacatttttaactgtttatccaatgcaaaaaacactagcaatctaagctgaaaaagaagcaaaaaagatcatgttgaggggacccagctttcaattcagtctaagattaatttttttcctattgaatcaacatagagctagtagggggttggctttcatttcttgaaaataaaactaaagtgaattacacttagttgatacattaagcaaaaaaaatgggcataaactgtaaagatagttggaagttggatccaggaaacttagttaatccctgtaggaggaaatgttatgttctaattaaaatcaatcagacattatttccctaattaaagaaataaatacttcttttaagttttaaaccatttgtattccatagattccctccctctcccaagtaaagaataaggtatttgctgtgcaaagacatttttacatgctaaaagcctaaaatcactcatgtatcctccactccacctatttgcaactaccaagtgccaaccagtacacactttgtcttggtcaaatagcttaattaggagaataattttattcagaaatcatggtttgtaaggtgaagtgcattggcaatcttgacaaaccaacctgaaaaattgcatgtaatgaatggatgtagctaaagcttgtgaattataaatgttaatgataagaaacagaatatgaatcataccaatttcaaaaccttcatactcaatgattgaatcatctggccttttattagccctgtcttcaaaatccattgtgtatgacataccagagcacccaccctgtttgacacctattcttaaacataaatcttgatttcgttcagacctcatcttattcaagtgcttcagtgcattatctgtaacagaaattgcaggggccagagacccagatgctggtgcagctaaaggatattgaggtgggggtgagtgaaagcaaagactaaaaaagtactgagcatggcagaaaaagtatttcacataacacacacaagtatataacaaaattcaaagtatactgtttagctgttgcaatctggttaatgatattaaaacagagtgaatgtcaataacagaaaactccacgtttttcgttggaattactgagtactagtccaaataacaataacttgctgagagttctttaggttgggaacttcaaaatgtctattatccatcatctaaatcttcgtatatgaatatagtgcctaattaaaagtgcaaatgtaaaacttctttacaccatcatctaattatgtaatgccaaatcattaaacgattttgaaatctttcctatcataacaactacctaggaagtcaagatcttctaatggtgttccaattcatcattagttcattacatgcaagtgtacaaaatatcaaatttgaactcctattgtattcctttaatagtcaaacagaacatgatttgagggtgatccctggcacagcggtaaagctgagtacaatatccctcccccttaccttcgcatagcaaggagcctctggacaatggggtacgtagtttagtcaaacagaacatgatttacaacaaaatattatgtcatcatttgccacatgtagctgaacccacctagtgcaaaaacgcttggttgatgttgtaaataatcaaattagtccctaaaaaacagtgttgctcatattaatccctaatggaaaacacaattgtggtccttgaatatgcatttagttagtcaaattagtctctaagattcatgattccctgaaacaaggactactttgaccgaagaaatgttcatttaagaaccttaggtgtaatttgtactattcaaagactaacatgactggcatcatatctttcattggcttatttgactatttacttattttcctttctttgcagaataaaacaactgatagagatggaaaaaggtaagagtgtatttggaagagcttattcacagctaattcaaacttatcttataacaaaagcacttgtataggtgtttgtgagagcttatgaaaatagcttataagttgtccataaatctgttttcagcatatttcaataagccatccaagataacttgtaaaaacaatttacaatttatatgaaaacagaataacttttattttcccttggattatagaaacaacttacactgatacataagcacttattcagaaagtgcttaattaagccatttacccaaacagaccctaaatgaaagggtaagaaatctgtctacaaggtcaatataccatataaggaagcaaaaattataacaaaagagttccggcaccattactatattgataagaaaaatgaagtaaacttaaattaaaagaaacccaaaaccttcccagaaattagggtaggcaaagctcgtcatgcaaatagtcggatatcttattacgagcaaacgatttgtttgcaagttgcaaccgtttcctaacaaaaccttcaaatggaaaaaagtgggtccctctttgctacaaactagaaataatttactctatcacgatgtatcatattctaagcgacggaattgtaatcataattatgatatttgtcattgatgttgctaattaacagagaaattaacggcaaattcataaacgaggaagtaatatataatgtaccaggaattgaaactgatcgaatggagagtggtttaaggcgtttgagaataggcggtgaaaatcgaccagagggtgaagatcggggaagggagatgggaaggcggagaaattgaggagagtgcatggtagtcattgcagagaaagccattggagcctgcagagagagagagaaagaaagaactacacacacaaacacgttaagaatttaatttaaatatctttgactctttcactcacacaatcccaattaaaacttatttactacaaatattaaataaaaatttaattatatcatgtaacttatatcttttatcattcaagtacattcacattgtttaatgtttatatataataaataaaactcgggatttgaaagttttaatctttgaatctaaaatatatagttgaaaattacaataaacactatttcaaatatgataaattgaattcatttttcagtacacctcttgtgaagatctgtggtgtcacactcacgtgtcatctatgttacataattgttacaaggatgtcatatgttatgttcatgtgtatttttattggacacattaatacttagcgttcgttggttttgctagaaagaaatgcgaaaaaagtatcattgggtatgaaatggacggaaacatatgttttctctcatttgttgtctccaaagtatcgaggaaagtgttgtagaaatgacaggtctcatgtttttttctcttttcaaaacagactatatgcatgtttgtaaatcaagtgaagaaaatgttttttaggcaaaagtagtttgtaaaaggataaaaatctgtttttatttgttagattgcattggaacgtgcgttacattaattttaattgcaactcaaacatatacacacattactatagaaaagtgataaaaatgtagatggaaattatttatttgaaattgtccctaatattgtgggacacgctggagataggatatcaagtgctaggtagtatttttttttttaataatcaatgggcctaaaaaggcgcatgaaaaatgataggaagtatataaacacaagtacattcactttttccaaaggtataatcgattatggcttttggcatattagattgtgcaacttttttttctataacgcaacacatggcatatttgattatgcattatcacataattgattatgtttttttttttaattattgatgaccagcggactagaaggaagaagaaaaagttggtaataaatacaacggtataattgtaattgtaaaaaaagttatttttattcatttattttattatctaataaatcactttaattcaaaagttcttcattttcatacatttttcatgtcaaccaaatgatttcatttttcactctccttcattccttttttttttcctttccattaacacactttttttttttttctttttccttcctagcaatcaaatacactgttaatgatttgaatttaatgtcaggaaccaaaattattgatggaaaataaattaaaaaactaaaaacaaacactaaaatctacaggactaaaaatcaaattttaaaatagttacggggtgaaaaaacttatataacactttataaaatgcaattcactttatatttttttaaaaatgcaattcactctgataaatttaaattattactattaaaaatgaattcatctatattttattacttcacggatcacatgtccttttcattttatgacacgttttgagctttctatattaagttactacatcaataccaaactttttttcttctgcctattagaatcagcctagtgatagaagaatttaagtagtttgcgcaaaatcttaggttaaaacattgtcattgctgttgatttattgtacaaaaaaaaacaattttttaatttaattacttccttagaagccatgacatacttgttaatttattaacatatgcaaaacagatatacgtaacattttagtttgagcattaaaattaaaagatcatcatgtaaagagtacagagaaggttacatgacatacttattaatcgtttagtaacaataaataaaatatacaacaaaagatttacacaacttttgattcgagcatgagaagctgaagagagtacaggaaggttttccacacatactgagatttagaaacccgtacgatgtgtaccaatttcgggatttaaaaatagacactacaccttaatgaattaaatgatactgtaccagagctcaaaaccaaatatgttcaggaaaacacattaatcttcttgcatcctacttcagcatgcacaaccacttcgttgttctgcttctgaaactgcttcagagattcctcgaaaataactgccatgaacagaacaatattagagactaacaagaattggatttgggtagcactagcagtagcatttatgaagaattaccacaacctaatcatcataattcataacagagaagaaaaagggtgaatgttgaatttaaagagataattaagtggtctaacaaaaaatagaaggcactactagtacaaaaagttgattctcacatgtcttgatcgtgttcattttctagtgcaattttagcaacgcataaaaaagcctcttcaacattgtaaccctctttcgcagaggtctcaaagtatggtatgtttccccgggaagcacaccagtctctagcttttttctctgtgacctgaaaacaaatagcacttcaaataccttgcatgaaaaggttcaaatatttggatataaaatttaattagaatggactccatagcgtagtgtcatctaattggtatttacattaaaagttacatacatatacctaaagtaatttataattggtagaaagtgtacaattctttacagtaacaatgtatgaaaatataatcattggaaaaggagggggtatattccatacccttctactgtttccaccgtctacatcaaccttgtttccaagtaatacaaagggaaatgcttcaggatcgttcatatctccctgaggtcaaacacaaaaatgtagataacattaaaaccagtttcacatgattaagcagaatttgatccaatcatttaaccatgtctgctcagtttgaattaaaagaaagactcatctggcttggtttggtttgacttaaactcaaggacaacgtaatccaaacaaaagacagaaaccacttattaacaagtacggaaagaagacatgaggcttgaaagaagtaacaaaacacctgcttaagaaactcatcatgccaattgtttagtgtatcaaatgttttgtgtatgttcacatcatataccagaacacagcaatctgcccctctataaaatgctgccccaagactatggaacctttcttgccctgctgtatcccaaatctgccacaatattatgttttcactttcattgtgtcactcaaaaaaataaaagtactgatgtcgatacttttttcatacactcagacataaagcaaagagaacatgtaaaaggaaagaaactttcaggaaaatttaaatagctcacctgcaatgttacgagtttatcatcaacttgtatttccttggtaacaaaatcagccccaattgtagctttatactgctggctgaattttctataaacatatctgaattcttagttaagttacacaatgactttatggtagcatgccttgtattaaaaaacttaaaaagccattttgagctattgttttaagtcaattccgatcaagataccaataactacagaaaatattatcaatatgaaaaatatcttcatttactctactaattttagttaataaaattttgccagctggtcctgaaccagtgtattccaaaacaactattgccaactcatatactacgagtgttggtcgtgactttacagagactcgttggaaatacgaaacaaaacaaaaagggaaacagtggaaagctcaaaagcattcatgatttgaaatgaataatgcacctacagcaaatcactgacaatcagaaaaactaacggactttcactttctatttgtttttttttttttttttttggctttcaaactgaaaatggatactggttcatcaaggaagtctttcccaccctgaaaataagatgaagaaaaaagaatgaattaacattcacatttagcaatggagaagcttccatgaagtaataatctcattaaagtaacagacaaaaagaaagggaattgaagatgcaaaatttggaatggaaacaatttaaaactaggtggcatacatacccactatcaccaagaacaatgatcttaagcaaagttctctttctctgtgaaatgtccatgttggagactcaaagctcaaaaggttagttggctgcaagaacaatcttctctatttctcaaggatgggaaatggaaatggaaaagaaggaaacaactggtgtggccttatgagagaaaagggaagttctcgattcctcttggttggtgatatgaatatcctcctttgtggggaattgcttttttttttttttttcttttcttcctttgattttccttttctgcatttgaatgatgcaggtgagtatcatgtgatttgcaaaccaaaacaacgttctagtgacagcggagcattattattatatttaacctataaaaaggttgtcatgtcacagttttttcttttagttgactttggaatatacgtgcttgcctctcattgttcgatctaaaatctgaatctgtatgggctgcaaataaagcagcaggctacactatgcttcacggttggacagttgagaaacgctattcagttgatcagttatgttgtaatctgatctcattctgacacactttgaaggaaccgatgatgcctgcatttaatttacagcactactatgtttttttgtgacaaccagcatttttttgtgtgacaattactagcattggagtggtggtagtaatgtctaacagactcattttcagtaatatgtttggtttagcctccggttgatataggtgaaagacaattgaaaaacagtcaaataagataaaactcatatttgtattttaatttaaaattttcatcttaaattacttttttttcattccatttcatttcattctattaaacactacaatagaaaatggtttagagaagaaagtgagaaaaaaatgaaaagtgaattgtaagaaaaaagagggctatttagccatttaaataagcaaaggttagctctttattgcttcagtggttacctaatatttgttgagagtctcactaaatatatggtaaccacttgagagagggggggggggtggtctatgtaattggaaacttggtttcatgcgatgtcactagtatatgggatgggtttcccttgtacctactgttaatacattctttttactgacaaaaaaaaaaaaacattcaaaataccatacaacctataccatcaaaaaatagtatcatacgactcatacatgttgatatgtgtctattacgccaacgacaaaactaaataaatataaataaaggaggaaaaatactctctcctatattttttcatcgaactaaattaattaatttatcgataataagaaattaattagtttagttaatagtattaaatctatccaaaatttatatattcaccatatcacgttgtaataaattgtttgctaccaaattaggatataacaatcttatcatactctttatcttattttattggtttagttattataggtgggagaagttaagttagaaagtaaaaaaaaaaaaaaaaacataattttgtgctagtataatttaattaaaattatatttttttgcatttttttataaatttaaaatttataaaattaaattaaatttacttttacaaaaattatatgtaattttatagaaataataattttggcattgagcatactttatatcagattttgtcatgaacgatgacataataatattatctgattcattatttagtgctgtaaaattaaaacttatcctttattttattatattttaatctatttttatatcttatcatgtgtttttcttatatctatcttatcatgtcttttttaaaatgttactttaaataacatttttttaaatactattttttaatttttaatttttatattttctttcattttaattctcaatatatttatttaatttctaaattatcatttctaaaaaaacataattttattatttttatgttattttacatttttcaattattttaacaattaattttatcaaacaatcataatttaataaaccaacttttcaaccaataaattttttaacttttaactagttttacagagcataacataagactgcgttgcttaattatgaataaacctaaatgaagatatttaagtatttattcaaattacagttcacaataacactaatgaaattacagtgagatacagcattagctattaactatttataaatttaatacactttatattgtagaattaattaaaaagattttttttttctagctatgagaatggtacgtggctatcactctcatgccccaacatctatctcattcactttcaaccctggaagtgcctagtcgccaaccaacaattaaagtgctcttttcacgtttaacaaaaatataaagtaatcatttctcaaaatatttatttatttatttattgtgaactagcttcctttccttttattgcttttttgcttcttgtcaattccgggtaatttcatctctacttggtgagcctcgcttttttcttccaaatcctcgcattggattttaaagtacaacacttgcacgttctttattctttttctccccccacagaagtatacttttgttctagaataattataccattaatttgatacgtcaataaaattttaataattaaacgtatgtttgctttgctgtctaaactttgatagcacaaatttcaaagcacctaaacggagaaattacaaagagcatgctgtggacaaactgagtttgaaaggatataaaggctgctccaaacatacactaagtctgcacctgaaaatatatatatatatatatatatatatatatatatatataagctttatgataaaaatgaatgtgattaaagtgactgttgctggtacgtgaccattgactcgcactaaataacattgaatcaaagaatgatgacggcgtgagtgcttggtgttgggtgggaatggcattgacgaatatattgatatatgaagtcaatgtttatcttatcatatgagttatttccttgtactttcccaaatatacatcatattagttttgatttgatgtgtcttagtctcagtaatcaaaagctctgagcagtgctctccacatacccaggatctccttcccgttatctgactagtgactaccgtcacattaattcctcctttgactagatacataattgtatgggtggtttgaaaaaataatgcttaaaaatgctataaaatatttatttacagtactccttatacagatttaaaagtcttttttatgtatatattttatgttattgatcatcataaattttgtatataaatttaataatcctaaatataatgtaaactaattttatattatcatttaattataaattattagtaatatgatttttataatagatattataaaagttaataaacttatgttatataatatttttttattttttatatatgatacttgactaacttattgcttacacttgccaagtaaacacagaaatcacgtattgcatttctgataacaacttcctagaagttttccaatcgaatttaaaaaaatggttgtctatgtgtttttttttttttttttttgtatatatgatacttgactagtttattgcttacacttgccaagtaaacacagaaatctggtattgcatttctgataacaacttcctagaagttttccaatcgaatttaaaaaaatggtttctatgtgttacgtaataatgtttatgtaaaaaacaggtatgatataattcatatggccaccaaaatcaaaagatagtgtgaactgggtattgaaattttcacaaaattaaactaataacacacccacacacccgacagatatatcttgtcttttattacatcatttcataaagtaatggtcaagtctcataccatgtattaaaaatataaattagatcttaatttttatgattaatcgtatttgatattttttttatattatttaaattaaaatataattaataactttaaacagaagtaaattaaatttaaaagaaaagatggacaaactatcaacggatttttccgatttcgataaaaatgagattgggttttaatttttcatctccatctctactctgcataattaagtggccataagctaatacaaaatacagtctttttcttttaatcttagatcatccatactctaatattatattgtacaaccatctagatctaatcctcgaatctaataagacaattatgagctacaattttttaaaacaaaactgcaattatttttctaattaagctaatcttaaagaaaagtctaattaagctagagaagcaatccaggggcaatttttgttatttttggtgaactaatatttgtcaaagaatatttctccgcccgccacaagccctcaactgttgatgctatcgtggataactagctaacgtttgatttaaatgatgagataatgaaacccaagtgctaattatttagggtaaaatccaacaacgggtcagcgatgcaattaaaatacacatatgcaaccatctatttaaagagataactaaattacattaaataatttatattatggtagtgcctttgtggccttttttacaatgacatcatcgcatgacttcaccttcgaatggttgacgttgacacgtggatccgagaggaaccttcattgcatcatctaggaaagagtttggaaggatcgttcatagaaaagcataatacggaaaactatatttatatccttctagttataattatttttaatatataaaaaccattgcctaatttaactcactcatatatcaaagggccaaatgctttacacagcatagtctttgttttcaccagctaccatatttagttatcagcaatggacttctactttggaaaccctcatccttatcccaataataatcaatatcatgctcataattctgtagttaacatgactccatcttcgcctgagatcgcactatccgattatctcatgctcgatgactatgttgatcatcaagattctcgatcatcacaaagcactgagtcatcagaaaaagcaaccttcagtgatgccactcacggattcggcactggtgcaacctctaagaacaataacatgcaagtgctttttccctctctcatttctcttccttcattaaaaacaggaaaatgatacatatcatcataattaaactcattatttctctctatttatctatgtggattgtggagcgcctgtacatgcaataatatacatacatatatatatatatatagtaatgaactgatgatatttagatatcctacaattttatacattttattaaaatacattatttctctttatttatctattcttatcatattatattacttatagatttttttatctctcgctcctctctttctcttgttaaataagtgtcatgggtgtccaaaaattaattttgtaatacatataacagaaaataacacctatagtattgaataatgttatgcagaaagtgcaaaaatgggattaatgaaaacaaaagaggagtgggtcctaggatcgcgttcagaactaaatcagagcttgagatcatggatgatggatacaagtggaggaagtacggcaagaagtccgtgaagagcagtcccaatctaaggtaaaaaaaatattactaatagtattaataaagtaagatattatttattgacatacttttttgcactttgaagcttcgttttttgagaaagaattacaaaatcactgttattatataacacatttagataaataagactaagtttaatttcaatacattgtaaaaaacagtttacactccaaaccaattagacctagtaggctatgaaacaaattaattaatacctggctatagtacttaataactcacgggacatcatttacattacaagctccttctagtgggatatattagggcaccaacatggtgtaatagcttaggttcaccaacatggctatagattaatgtttgtgcccactggtattatattaaaggtttgggatggggacggttgtgttgtccttttagtgtatatgtaagttgggtgttatcaatggaccccagtttaaatgtgtgctgtttcgacttatatagtaagcaaagtggtctctctataataagtaccaatcttgatttggattgttactaaaatttaacaaaattagttaaaaaattaattagaagttaaaaattagttagaaattttaagttaaattcaattaaaattaattgttgaagtagtttaaaaatataaaatgatagaaataataaatttttaaaaaataataaagaaattgaataaatattttaaggttaaaaatggataaaatattaaaaaactagaaattagaagttagtattttaagaaatatttcttcaaataatgttttaaaaaatattaaaagttacttaattttttttttaaattgtcaaataagtttttcaattagtaaaaaaaatagaaattagataaaatagcttggtgaatatgacatttgtgctctttagtctatttttttttctttttggatttttgtctgtttgaaattgataatagctgtttgtggggatcaaatattttgttttatttgaaagaaattaacattactgattgagagagatgaatttttaatttaatatgacaatctatttaacggataaatacgtgttaaaatttaactgtgtataaaattcttttagaccaataatgattatgcaacacaagtaaagttagtcttgaactaattagaagacatttgtgatctttgaccacccaaaaaacaaaaaaaaaaaagtataaagctttttacaatgtgagtaaatagaaattaagctcttttaaaaataattacaatgaaacataaaaatttcaaaaatgttactatataaattagggataatttttttgttatctgcacactatggccttaaagtaaaaaaaataaataaataaaaacttttactctaataactctcttttttggtccccgtctctccttcaacttttttctttctttcatccttcttcaattttgtgactctcactggaatttttttcattcctttcatgactggtctccccttgtttcatttttttagtgaaaaataaacattacacaatacagatcatggttatttttgtaccattgttttgtgaattagagaacgtataaaataaaattattatttattgatgtgtatcaataaaaaaaaaatacacaaaaacagaattttgtactaatcataatacctacatttaatcatttttttaaaaaagggtaaattagtcaataatattttataaataagtacggagggaatactatcatagttccatcccttttgacgagttaattaatgcttacagtgcaatcaatacatttaatacgttaagtttttcaagtaggtgactaattaggaaattccattaatgatgacaggaactactacaaatgttcaagtggaggatgcagtgtgaagaaaagggtggaaagggatagagatgactccagctatgtaataacaacttatgaaggtgtgcacaatcatgagagcccatttaccacatactacagccccatctccttcgtacattctgatactactttcaaatgacaccaactccaaccccttttctgctcttacacctccctagcttaattatgtgccgagaaaaggcttggaagattcgatcgagcaaggaaagctgtgtcaatgaattgtctaattaatcataattattttcatgctgtaataggttgaagagagtttctatacccttctttttccattttgtttttagatgagtttaatatctcacttaatggaaaatcaacctttgctagttcatgtggcaaggaacatgattttccatgtgtaaagttgttcaaatcttaaaatagaatggaatgctttgttttgttacagttaataaattcaaagttgtttaagctggttgacaagtgcgatgtcgaaagtgattgcgatgcttcacaaatgcacaaacacttaagttaacgggacaattattaacttgcagcaagttgggcagtacttaatgatccttaagtactacgtcttgtttgactttgacagaacggaaacagaggaaacttcttgttgggatccaccattcatatgcatgtttatgttttgctaaattaaaattttaattaggaaaatatttgcttagacattagggaggcggagacaaaaagaaaaaaaaatgtttaataggacttatgatacgatcgaaagagagaggtaaagaaaaataataagtgttaatgagatgtttaaaataaaaaaacaattcatgtatgattatttatttaattactagtattaatttttttacagcagcaaaatcagttcatttctattgcaataagattatgaatacaatgatggctgaaatgaaagatttgtgagtcaacataatttgtagaattcctagccaaagtgtgattgaacattataacattttaaaatgtaattctcaatagctccaaaacctctaataccatcctccacgaaaaagctgcatcagtattacattttaaaaaactagcaggaggtttaatccacaccacagaatctggtagcaattcaccttggatttcataagaatttatatgttgagctaatttccattcactgaaagctacatgagctctattcaacagtccaatatcctgctcatcacaagaattccaaagtctttcatttcctctcttccaaatactccataacatacatgctagattgaccctctgaaagcgagcaacataaattaaacaccatttaaagtactcaacatttagcaacacggattcaatcctttgccataaaatgatttattaaaatttaatataaatttaagtactatttaagataaggagtaataataaaatgatttatgaaaaagtataatagttaatgtaatcaatattaatgcattgttaatgtgatttttaataaaaaaatatttattattttcttaatttataatattgtaaataacaggacttaaaactaaaaaaaaatatttatcttcacattttggttataaatttgggaaaagtaataatgatgcttcatcgtcattttggttttatagggctacaatgtttaaaattatttagaataatcatataaaacttttttttggagagaaactatttgtaacattattttttttctcattaaatttattgcatgtgtttttttaagattattgttaactaatatcctaaaaaaaatgagtaagaaattaaaagaaaaatattttattaataatcaaatgagagcacatttaaaaaataataatagaacacatttttagtattttaatattttttattttcttaaccaatatgcttaagatgataattagcatctactataaaatgataaaaatattacagtacaatgtaaaaaaatctgtcaaaagtttataattttatagataatgaaacaacaatgcgagaaagtaaaaaaaaatgttgatttttgtacactcactgaatagtaacaccttatcaacaccattcatttattatcatttcacatcattaatcatatacttttataaatcactcatttgtctttcatttctatatccctctaggtataagcacctaaaataagaagagttaaggaatcatttttcataaacaaagtttaaacatagacacaagagaaatcatttatatcattcatagggattaaaatttcatgataaatgttaattaatatcatataatttttaaatatgttctcatgtgttttcaataaaatctttgatattttaatttcttaaacaattagttgacaagaccctaaattaagtaagaattaagttgactcaaactacagtatttttgttaataaatttatggattttgttaaccaattacctaaaacacattaaaaaaaattttaaaaaacttttttttataaaaaaaaacaagagcatatttaaaagtaataaggaaacacatttttcttcattataataactttttttatttctttaaccagtaacattagagtattggttgccatttccctttaatttaaactccatcttaatcaaatcaatatataatcaatttttcccaagtttacaaattcaaaatgtcaatttaatcaaaatttaagggttgcgaaagtaaatactactactagtattttaattaccgagacacatggacatcacgtgctattggatcgcgtggctttcacgaatgagtagcgagagatggcatgattacgatcatcccaaaacaatttcaagacactacacacccctcccaacccaatcaaatcaaatcttcgttcgaatccttttctctttctcgttcaccgcatcccaaactcaccagatccgtcgtcgattcggttttccccctttctatttttcgtttcccattttctcccggaacgtgaaattctcgctctgatctcacgtgagggttttggaacctgatgagtccgtatatgtggatgtgtcgtagtgaaggcgtgttttgaattatcgtcggtgtagaaggaatcatgttctggagggaccgtgagagagagaacaaagagttgaacggtggggtcctatgtggccaggtcagagtcctcgttgttggtgattcaggtgcgtgcgtctttctgttaccaattttattttacgtcttttcattttttagaataaaacttgtttgcactactagagtgtgtctactgctgttcatttaattttaaaattatgtatgataatcttattgcattaacatgtttacatagatacacatttaattgtagctttaatttttattgtgagtttaatactgggagattttgtgattgtgaggtgtggagaaaagtgaagttgattgaatgcgggaggttgtactgtaaagattggggggctgagaaaagtactcattgtggtgataccgttattataacactcaatgggagctccaagagttatgttaatgatattagctgccatgtggtgtgttgtgcgtaaggttatggattttcaatttgaaatgattttgttgatagttatttccttttggtctgtggtttagagaattgatttacgtaggctgctttaagaggattgggaacttaatgtaagagaaacgactaggaatatggtggaggttgctgagaaaccttacggctgatgcgagtatgtcccgaattagtttgacaatatatttggacatacttttgaggtgtgtatgcgtgagctttcaaagttattcagaatcaagtattcaaggatagcaggacaacttcaaatattggaagtctttgactccacaaagtttggatttattatttggattgtagttctactattaattggtgcgagcataattggattacaattaatatatttttaaatatcatcttaaggacatactcaatcctaatgattgagagcaacagaaggctagattttttttttttatgttatattatttaactaagggcgaaccctggcacagcggtaaagttgtgtcttagtgacttgttagtcatgggttcgaatccggaaacagcctatttgcatatgcaagagtaagactacatacaatatcacttacctgcgcatagcatggagcctccggacaatggggtacgtagttttttttatattatttaactgaaacagtaaagatcaggaactgagcgaatgatgagctacctcatttttgacagactgtagtacatgcagtgaatcttaagtaaaacctgtttatataaatcaactctgcgcaaaaggaaataaaaatctaatgttgcttaataggttgaggatggaaatatctcttgcgtagtattctgtaagatctggctcagaatatagagatagaaatggaaatctttattgaaaggtggaaatcgctggtagttcgagagtccagatcctcccctttcactaactaactagtccaaaatgtgtcctctctcttctgcccttctcctctttattctattattcaattccatccccctgtaacctccctgtctaactaactgccatccctagcaagcttagcatagactttcttattggttagattgctgacatattccattgctactgttaagttgctgcatatgttgtcataggggcaatatgctaagggcctacttggtttaatgaaattttttctgtttctacattatatttttaataataattataaatgttgcctcttttcacttttgtttctcattttcaccatttctagtacaaattttcaaacaccagaaacaaactgaaatcaaggttgtggtttgtaattagttaaaagaaaagatagaatagaggtagaaaacatttccttaaacccaacaggcccataagttgtcggtctttggacataattggtggtacttcccatctctaaacttcataagcctggatgtgcattagtcaaccatagctaaatgttgaaagaaaaaaaaattctgagcttgtgattgcttgcaccttcatgaacatttttcagagatatcgtagttgcatatttgtcatattttctcatccttgcaggtgttgggaagacttctttagttaacctgattgtaaaaggttctccaattgcttgccctcctcaaacaattggttgttcagttgatgtgaaggtaaataccccccttctatggttacatgagtgtacattatttctgtaccatattcttcatcaaatttcctgtttctttttccagcatataacttatggaaattcaggcagctcttccagtagccttaagggtgattctgagagagatttcttcgttgaactgtgggatgtctcaggacatgaacggtacaaagattgtcggtctctgttttattcacagattaatggtgagttaaaaaaactccattattttagttttctaaaatgtattattgcttatattgcatgaggtagttgtgtataatcaatttaatcatgtggcagtgtacaaaacgaagggtcaagatttgtggccaagggggaaagtaaataaggaagaggatttccaatatttaacagtcaccatatatatctttggtttctctttttcaagtcttgcatgctgaaaataaaagaattttaatatggaacatttagcaaaaatattttaaatctgcaataagaaatcatacatgtttggctgtctaaactctaaacttcatttatctgcaaattatcttaattaccactattctggataattgcattagtctcttaattaatggcatttgggtattctggaacttttgacaattaaaatcagtaacagtcagtgcatattagagagttggctgtctgatattttaaactgtgaaaccttgttttgacatcgtttgcaggtgtaatttttgttcatgatctttcacaaagaagaacaaagactagcttgcagaagtgggcagctgagattgctgcaactgggacattttcagctcctttgggatctggtggtcctggtggccttcctgttccatatatttttattggtaacaaagctgatattgctgccaaagagggtacaagaggaagcagtgggaatcttgttgatgttgctcgccaatgggttgagaagcagggtttgcttccttccagtgaggagcttcctttgactgagagttttcctggtaatgggggccttattgctgtaagtgtctcaactaaaaaattgtctgtcttgccgatttgttttgcaccactttcaatgcttgagataatatgctaccctcgtgttaattagtatgttgtattcaggtcaatttgaacaaatccgatgttaatgctaattactagggagtttcaactactagcaagtagcaatttttagttttgcttgtttggtactttaaagctggctgttgctttttaaatacaatgtgttagtgttacacttgaatattttccacttttttttttttttgtctgaccatatatatgaaagggtgttttagctgatggaaggggatgggatttaatgagaaccataaaaaaagcttctcctaactgcctccttttccctgtcaggcacactgaatattatggatgacccgcattgaaacttcacatttcactttggtgccatctatcttgattaaaagaagatttttcagctttcattcattttcaaaattgagaggcaaaccattaaacattttatcttaactgatcttgaagcttatcaatgcatatttctttgagccactcagtatgaataatgaatttagcttagccattgcccgctgtgctgtgctttagaaaatgttagactggagatgctatactgcctgagaatctttatttctcatgttgtcattctaaaccgaaatactggttgttccaatgaagtgacacatcatgtctgatataattggatgcagagatctgccctgtttttgcattctgttgaatagttgccatccaattcattcttcttataacggttatgatttttatgttggatatctacaggctgccaaagaagcaaggcatgacaaggaggctgtggtgaaatttttccgcatggtcagtatggtctttgagctctgtcttttttatttttaatgtatgggttttcatctaagttttgtggctcatctcctttcagttgatcaggagaagatatttctcagatgaaatacaaataccttcaccagcatggtccattccttctgttcagagacaagctcagcgtatagatgaaaatttcacagaagatgatcaatcttataatacaaggtattttctacttgtcttctaaaataattttggagatggaattatattataatacttgcttatttcattatcaattcatcatagtgcgcgcatgtgtttgctcttttttcagcttgttttatgccacttgttacaaagttcattgttgattgcagtctaagcagtgatccttacaagtataacatgcttccgccacttccagcacaacgcaatctaacaccgccaccgacactctatcctcaacagccagtttcggtgtcggaaaactacagtttccctagattttccttgtcaggctcctcagaaatcagtactgtggcgagaacaaagcgatcagatattaatgtctgaagatctgtgtatttggtaattagtcattgctaatacatggatgtatacttgcatggaacaaagttatatgcttgtttaaattctttgttcctattgtaacttgtccattgattcattcgtttttaagaggctttctcagtagacggaggagctacttgttcaaagtttgggaagaatttaaatgatacatactcgattcttttatatcatacttttttttcctgccattgaaactatcaacactcaacagtattatggctaacaacactctccaaataagaaggattccactttgataaaaccgttgatgctatcccgtaaattgggtttttcttttaaaattgagtttgaatattatacaaattggcgtttaggtccaggagtgtaagagtagtgtcaagctgaatatttttcgtggagacattattagatgttctaagattataatagtcttgactaatttttatataatgcttaattgagtgttatttaattgttattcataaattgaaaactaagtacctatcacataaagattggttgaaattatggataagtaaaatagtgggtttagattagatttatggtaataattaattattttttcacggaaattttactttttttttggtaccaccattaagaaatagaattgtttcttagggttaccaaatacattagaagtcttaggctatctattaatctatcttgtcgggcatactttaaaaaagatttaaatcatgtcttctgcggtgactttttacatgagatattagcaataaaagaatttaagtgaaaaaaaaaaagaatgtaatttttattgatttaactattgaattatatttatatattatcaatattatttgtgttaaattttgtcaaaattaagtaacataaaaaagaaagtaatcaaataatttatattttaatatattttaaaatatttatattatattaattttaatctataaaaatgaagtgacatgattagattaatatgaaattttgcatatgtaatttatgtgaaaggaactttcaattcaacagtgagttttaagaaaatattattcaattaaaagttatagaataatataataattgtcaaagttacacttatataatttgataattctagtaattgaaataatgaaacataaagtataaatttacatttttatttaaacatagattgttatttgattaaaattattggtttttgtaatagttatttaaaaattatatctactataatgatttttaattacttgataatgtaaaatatttatactaatagtgcattaaaattaaaattgttatactataaaaatttattaattgatatattttaatatatttcatttgttagatctaatattgtccttctagagtttaattaattttgaaatattgtcctcataaatattttttattaattaattcgaaattactctatatatggttttcaaaataaatatatgacactctttcattggatgacagtgttttttattttatttttacctattatattctaattaaattctaagattaaagcatgttgttacgaattaatttcgtgccaaaagatttcttaccctatgtatagaaccaccagaaataaaattgtccacaacttttatttctggcattgttacttgttagtttttatttctctttatttttgaagaaataataaaaatgtttgaattttgaaatattcaagtatatatgggcatggaccactacatgcaagaagcgagccccacgtagtagaacgtgttcaacgtcgagagatcggcgaactactaacaaccaaatcagccaaaatacctaataggcatccctcttctctaacttagctcgaataattaatttgttactgattaacatggataaattcagcagaacaattctattctttcttcttttctgggtcctaatcagtctccaattccaacgtgcaacacctgatcatgaagaaggtggccaaaatgttgctcaagaccacccagaaaaaccacttctttctaagatgttgatggataccgttgctctactcagaaagtcacatcaaagttcctgggagaaaatcaaaactgtcaaacatgatctgcaaatgcagttttctccaccaaatttggagtaagttaattaagaggtccttcctgttacaaacccatgacccatttctgttcttcttcacaaggttaaatatgcatgtttcttgttcttgtaaattttttgttcattttttatttttataattaatcaaatgatgtagttttggtctcgttgtgaattaaaaaaacatgtataacaagagattaaaactacaacattttgcaattgggacccgcatgttatcttgagaggggtgcaatgagttcgagagaaacctaagaatatagatagtgttgttattttttacatgaccttctggttttataattggatcgacccctctgcttttaattttttagttattatcaatttttatattttgttccttttatacttcttttggttagatatttcattttgttttatatttattttcatatgtatgatagaaaatactttatttttaaataaaaaataatccctactgtctccgggttctggatgacactttgttcaatataagaattaaaaatgaataaaatttttatagtgacaaacaaaaagttatgatatttttgggaatcaaaaacatttaaacttttatttagttatcattcatatttccatataagtaggaattatgtatttttttttttttcttctcagtttcaggggtacgggatgggtagaatatgatggtgtcgaaggaacgttcaaagaagcaattgagaagatttttggcaaaagcaaagagacagttgaggagagtgctgaaggagcagcaaaagtagttgaagaagcaattcataagacaacagaaaaggtgaaggagagttctgactctgagcatgagtctaaggcagaactttaatttttccgggggttggatttaatcgaaattgtatggctgttgcttaaattggagatagctatctctatatgaaacaatttatttatattaacactgttcccactttcggccaaatgcttggttggaagaatgagaaaagaaaagaaaaaaagaagctggaaagcattaatttctaatactgaagaatagataacaagaacctaattgcaacatatatttaattgctttaagaaaattatacaagttatggatggtaatttaatgaacaaagttctttcttctattagtcttttaaaataatgatatgaagttatggatttcatgaagcaaaagttccactatctatttgcattgcattatagttttcgcttatttgtactttttgtctctagagttatacaatcactcaaattttgccaagtctctgttattaaatgccactaacacacatgtataaaataattattttaaacaaagtgtagatttttaatcgcaaccattaacgagttttattttctattggggagagggcttgaggtagctgacaccacccatggctacacttcactgctcaatgtcaagtcggtacatcaacaagccgctgccagaaccaaacccccaccaaaaaccttcagttgcatacccaaaaagaagagtaaaaaaagaaaaaacagaaaataaaaatcaaagaaaaaaaagagatctgattattggaatattccatttgtaataaactataactgtataactgtacaaaccgcatttttctttttctgttaaaaatcagttatgaagcttactggtgtgtataaatagcttccctttgtatgtaatcgttaatgatgaataatgaatttttctcatccacaaaccattattcatttgtaagatggtatcagttgatattcctctctgatttttctcgcttccgcaatctttttcctcacaaccatggcagcaccatcggctttccctgagccaataaccaaccctgctaatcctctctaccttcatcccaatgagaatccttccctagttctcgtctctcctccgatgaatggcaagaattatcacacttgggttcgagccatgaaacaagctctaatctccaagaacaaattcgctttagtcaatggcagttatcccattccagattattctgctcctaattactatgattggcagagatgcaataccacagttctctcctggataagatgttctcttacagattcaattgccaaatctattctctctgtagaacgtgccgataaagcatggaaggatttaagagattgtttttcagaggctgacatatttcgaatttctgatttacttgaagaaatctaccatcttcagcaaggtgagctatcggtaggtgattatttcacagagttgaaaattctttgggatgaatatgatgctttggatccaattccttcatgtcattgcaattcatcttctatgctgcgtaattctagggatcgcaatcatgtcgtgcgatttttaaaaggtttgaatgaatcatactctgcagttagatctcaaataatgctcattgatccttttcccagcataaataaagtgttttcattagtgattcaacaagaacgacagctacatgttgataatgtttccctatctgaacctcgagcattcactcacagcatagatcctcgaaataggcataatcacaataaaggcaggggtcgaggaagaaatacaaagctttgtacacactgtgggagaaataatcatactattgatacatgttttgttaaaaatggttttcctccaggtttccaatccaagcttgcaccaaaaactgccaatcatactgattctaatctggctaattcttctactgacactatggtttttttccagagatcaatatcaaagcattattgatttaataaacagatccaagatgaatgacaatggatcagatgcttcacacgcttctaacctggtgcaagtcaatgcttcttcttcttgtattggtcctgagaattctggtaagtgcttaatcgaatggattttggatactggagctacagactatattaccaattccataaaacatttttcctccttttctgctataaaaccagtttcaataaaacttccaaatggctcacatgtgttcgcatatcatttaggcattattaaattttcaaatgatctcatactgcatgatgtgctttatgtaaaagagtttcatgttaatctcatatctgtcccaaaactattaccttcatgcaaacttattttttctggttcctcttgcatcattacacagataaattcccagaagatgattggttcagctaatctcagaaatggtcttttcattctcatggaatccttggtgcctcaagttcacaattgcagagcttgtcccaccaatgattctattttatggcatttgagattaggtcacatttctcaaactaatatgaaacaaatgtgtactaaattctctttcttatcttcacatcatagtataccttgtgatacatgtcactttgcaaaacagcacaagcttccttatacaacaagcacaactttcacttcctgtatttttgaaattctgcatatagatatatggggaccatttatgactccctctattaatggtcatagatattttcttaccttggttgatgattattctcgttttacttggattatacttatgaaaactaaggctgaaactcgtgatcatttaaagaacttcattaacatggttgaaaatcattttcatacaaatattcaaaccattcgcagtgataatggtgcagaattttccatacctgatttttttaattctaaagggatcattcatcaaactacttgtgttgaatccccacaacaaaatggggttgttgaaagaaagcatcaacacattctaaatgttgctagagctatattttttcaagcaaacttaccttcaactctatggtctttttctgtaattcatgcagtccatataattaataggttaaccactcctctgctttccaactgtactccctatgaatcattacataaaacccttcctacattggagcatttgaaagtttttggatgtctatgctatgcgagcacaattacttcccatcgacataaattctctactagagccagaaaagctatttttcttggatacaaagatggaaccaaaggttatcttctctttgatttaacttctcacagtctttttacttctagaaatgttgttttttatgagaatcaatttccttttgtcaaaacctcttcatcagatttattaaacactgccacacattctcagccaaccattaatcttgatttcactcctttaaatcatgaaacaccagatcttatcaattctcaaacatctgattctataaattcccaaaattctgaaatacctgactcctcttcacccacacatctcagaaaatcatcccgtaatcgagtgcctccaactcgtttacaagactatatttgcaattcttctactacaacctcttatcctctggaatctgtaatgtcatttgctcggtgttcaaaatcctacacgcgattctgtaattctatcacttcaaatgaagaaccaagatcatacacagaagctgctaagcattcttgttggcaggaagcaatgcgtgctgaaataaaagctcttgagcagaacaaaacatggaccatagttgatttatcacccaacaaagaacccataggctgtaagtgggtttttaaaattaaatatcgtcctgatggtactattgaacatcataaagccagattggttgctaagggatataatcaacttgaaggtgttgatttctttgataccttttctcctgtagcaaaaatatcaaccatttgtgttttattatcacttgcggtttcacaaggatgcatccttgaacagcttgatataaataatgcttttcttcatggtgaattggatgaagaagtttacatgacattgcctcctggatcacgtactcagagttccaaacaagtatgtaagttacacaagtcactttatggattgagacaagctagcagacagtggtactccaagttatcacaggctcttatatttttaggatacaaacaatctaatgcagatcattccttatttgttaaaatcacagaaaaatcatccactgctttattggtctatgttgatgacattgtacttgctggaaatgattatgtagaaatccagcatgttaaaacttatcttgattctcaattctctattaaagatcttggaacacttcgatattttcttggactggaaatttctcgatccacaaaaggattagttcttaatcaacgaaaatatactttggaacttatcaaagatgctgggttattaggtgctaaaccagtttcaacacctatggaggtttcgactaaactaacatctgatgcaggagttccttgtcaggatgcttctcaatacagaagattgatagggcgattactgtatttaacaataactcgtccagatatttcctttgctgttcaacagttaagtcaatttgtttcaaacccaatggatgctcatatgaatgctgcaactcgagtacttcgatacctcaaaagctctcctggacttggactattttttagctcagataactctatcattccctctggtttttcagactcagactgggcttgttgcctggaaagcagaaaatccattacaggatattgtgtttttattggatcatctcttgtttcctggaaaacaaagaaacagacaactgtgtcacgctcttcctcagaagctgaatatagagcccttgccagcctcacatgtgaattacagtggctctcatttcttttcaaagacttgggcattggtttatcaaaaccaatttcggtttattgtgacaatcaatctgccattcatcttgcccataacccaagtttccatgaaagaaccaaacatatagaaatagattgtcatgtcattcaggaacgcattcaaagaggccttatacatttgtttccagttacttcttcaacacaacttgcagatgtactcaccaaagccttgcatccaaatcagtttcgacaccttatttccaagttgaatcttattgacattcatgatccaacttgagggggcatattggaatattccatttgtaacaaactataactgtataactgtacaaaccacatttttctttttctgttaaaaaaccagttatgaagcttactggtgtgtataaatagcttccctttgtatgcaatcgttaatgatgaataatgaatttttctcattcacaaaccattattcatttgtaaaactgatcagttattttaattatatatatgtttggattcaaggttagaaatgtctttgaaagttttattggtgaaaaaattttatatttttaataaaaaattctcaaaaacacttttagtttatattcaaaaacagaccatatgttgaatccgaattttcttcatttactcgaggagtccaatctcatgtctctctcctattggatcttccggtaaatagagaatatattttttgagctaattggccattcatatttcatcaagacttatagttcttaggatgaaaaaaatcgaaaactcttattcaaaattatcttgattcagccctgtaaaaaattgccaaatcatttgactgtttgtccattccaatataaaggattaaaaatcaatgattgtcatgcatatattataaggtcagttacgatgagtgaaatttctttttaatgattatcgtctcttaataaatattgttgacaggagaaggaaaatctcaaaacctgatgaattaaaactatatataacaataaattagccaattgagtaatgacacggaattttaaaaaattaacttaattttatatgattaaaaaatatgcaattgtattcgctgatcacacgctactgtgaagaattcaagttttaatatcaacgtcaagctcaaacttaatttattcgtggatgtacatgacttttctatttattaattgttcaacgaaagaattaaatccggtttaatagtcaaacgtgacaatttgaatcaaatccattgaccgatcaattgcttatttattaacacctatcatatttacctattaattgtagttcattctccggcaaagataataactaatgaactagaaatgcctttataataattagggtgtggttggcaacgcacgaacagtagcaaacaattaatacttacaatcgacatcgacagaaaaaactaaatagtatttttttaataaaaaaatattaatttatgattgttttgaaattatttattaatatgagacagtgatcatatctaatttgggtgtgttattccatgaaatacgtctaaattgagcatgtttcaccctgttgtgacacgtatcacatacataaattgatggttatataaatttcagataagttttaataaaaatgttcgattgaggcgtatcttgtgtcaaaaagctcgaaattgagaagagaagtcctgagcaaatcccaaaactattatttccaaaaaatgactctaagtacctcaaaattaggatttaatcttcaatcatccaaaaatttccttgttttctacttttttaattatttaattagttaatttaatgctattatttattttttaattacttctcataattttgagcattttaattacttctatcaaaagttagatcatttgaaaaatatatcgtacgtttttgtaatttttttcgatattctaaattcttatatggttttgtttaatatttttttgattttttatataactaatttttaatataatattttatttaaaatgatttctatattaaaaattatttacaatttagaaaaataaaaattttcaattttttcagattccaaaataaaattgaaattttttattacataaaatattatattaaaaattggttatataaaaaatctaaaaaatattaaacaaaatcatataaaaatttagaaattatattaaataaaataatatattacaaattagatataccaaaaatccataatatattaaataaaatcatataaaattaaaaaaaatattctaaataaaataatattaaaaaaaaagtaaagaagatcatatctatgatgaagatcggtttaaaaatattttaaaattagataaaaataaaaattaataatattaaatcatattttacatcaaaaattaaaacacgtctaattttggtctttatttcagtcgctaacagtttttgcgacaacatattgtggtcgcaaacataaaaaaataaaaaactataacattctttctaaaaaattattagcgactaaattagtgacagaattagtcacgcccaatttaaacatgttctggtgggtaacacatccaaattagacgtaaccagtcacgtctaatttggatgtgtctcacagtcctatgatagtaaatagttttaaaataatctcaaactaataatcttttattaaataaagtattatttaggttctttttccacttatcatacttgaagttgaagtacaaaagaggatgaatatttagaaccaaaagcatgcagtgatatctattttcattcaaggaaaagatactattgttatactattatttttattattattaactgaaatttattaaaaaatatcattttttgtaggtattactttttttaatgagcttttttattattttataatttccacaaacatttaattaattataagttagaaagtatgttgataactatcatcttaaaaaaaacttatttggaacagattactattttaattatatttttcaggaacctattgaggaagaagaaaaagacaccgaaggctgaagggaaagataagtgtaaaagtcgtgagcacactgctgtgttgggtaagcatagcgtgtctaagagtggcattttcgtaaatgaactgacaaaacgttacaaaagtcttcaattaaaaaaaaaaaaaaagagaagagaaattatacttataaaatgatcttaaaacagagagaaggaaaggggaaaaaagtgacgagagaaaaaaatttgaaatgttataaataaatatataaattattgtaagaattattatatatatatatatatatcatattattaataaaaatgctggtcaatgcagtttttttcggtggtaagtattatacaaactagagacacaatcaatgatttaatataaataattaatatattaaaattaagattaagttttatttaaataatatttgagtttgaattttgactaaaataattttaatcaaattttatttatttttcaatcaagtcagattaataaagattttctgataaaactgaagggttaatacacatgatataacgttactgcaatcgaatgagattgaatcgcattgttcaataagtttcgtatttcacatcatcgccaactaacggggacctctcgtttctttctcttctttcacattctcctatcttttgtttgtttcacttcattattacttgcaatttccaaacctctttcgagatctgaaaaacactctcatggaccgtcgtaaagaggttagtttctccctctctctctctaattagcttcttcttcacacactgttcgattcataaaataagtaatcgctgtattgtttacgtcacgctaaatcgccaatctggagattaaattgaagcagaaacagagagagcagagtcttcttctcctttaattttgaaaaggatatactatatatatatatatatatatatatttatgaattacatatcacacctcaactcaaaattttaatgttcaggatttatgagtcttcacctctttcaacttatttatttttatcctatatgtaactttaactcacttgtaatccaacatatttaaccagattaattactgcttaaagtagtttaaaggtcgaaaatcttacttacatgcaattctttacctgcttttggttctattctctttgttaaattaaggtgaaattctatggttaattaatctgagaagactacaaaaattatctaaagaattgaatgttttatccgcctgtaaaatccgtagtttgtttctcgtctgatttaatatttatttttggtcatttaattaataatagctgttattcaacattcatctgcagagattgttgtatttttcttcttcgcttgtttctttcgtattttctttaatctgtttaaagggagacacgggtaccatgattcatgagcttccctttacagctcggcttaattaatcattttcttttactattgcattttctctttctattatttcatgtaaacttttttaaaggatgaagattctctacaattgtttttaaccgcgaacgaaccttgttttgctttgaaacgttgatgacagtgttacagtcgtacaagtaatcataaactccttaatttctaaagcaaagaaatagtcaaattcatccctaacattcgttcttttcccacgtttgctttatatatagtttgttatattttcctatgctgtctaagtgtgtgtatgcgaaaaaagaaattgattattgtagaattgattttgatagaagtacttcttcaattctaacaatttttatgtatcataattaattttattatcattgtaaaaacaattaaaatatgtaaaatttggtcaaaattaagattgacccaactcatcataatatactataattttagaaattatccaaacatgcacttagtaacaactcgtaataagtaataatactaataatatttcctcttatatattttaaatctttcaattacattttgttttgtatgctacattttaactaatattaaattcattacaaatgaaagagaatttaattcagttagttgaattggatgcttaaattattataattattgatgatagtttcttcgatttctaagtattaaaaaaaagttcattacaaattatgaaccccttaatactgtgattagctgactaagttgtaaacatatatagaaaaatggtccatggttatcggtgccacaatttggggactgggatcagaagggccaagtgccggactactcacttgatttctcaaagatccgggaaactaggaagcagaacaagaccaatatatccagggctagtcttggcaatgaagaagagttcatggattcaacaacctccagcagcgtcaacactggccacagcagtgagcaccctcaagcgcactaccatcaaacccactctccaactgtaagattcttgtcttcacaagcttcgctgttcactacaaaaaaatcgctatttccgacggacaaaatccgtcgctaaactcgaaaatccgtcggaaaacggaatttccgacggcatttccgacggacaaaaatccgtcggtaaaacgctcgtaggaaatgttggccgtcggaatttttttccgtccgtcggaaatttccgacggaactatccgtcggtaatcacctgtgggaaatttccgacagataaatccgtcggaaatacacgtacaagcgctttctacatcgacaccttctaagacggtttttgaaataaccgtcttagaatgtaattttgaaaagaaaaaaattgaggattctaagacggtttttttcagaaccgtcttagaatgcgttttaaaaaaaaaatcaaattgtatttttttcattcaatgcttacacacattcaatgtctattaactatatttttaatttacaaaatcaacaaagcaatccaatataaacaaggttacacaactaatcaaaatcaacaaaagttattacaaagaaacacaatataaacattcttacaaacaaagcaatccaatatatgcaggggaaggaattgaatacagaatgaaccatagggattgatccactccatttatttaaacttctaaatgtaattttatttcattagatgcatacgattctggactttttccaccttccacaagctaaaaccaggaggacatcatttctcataataacagagctttccacatccaaaaggttcacaagactcctactcagtagcatctacaaaagagaatttgccaaggaaaatagaaaatacatacagaaatcataaaagctctcttagctaaattctccaaaagccactcaggtatgatgttaagctctcttatctaaacatagcaagaaacaaatatttatattaaaattaatataataccttgctgaagtaaaaaaatcacaggaatgcaaaagtaaacatagtaaaaaatatgtagagaaataatgtcacatacataaaagtacataaaataaaataaaaattactatatttggactagtgtttttacagccaaaaaaattctagcatttaggattgtgtttacagtaaggacacttaggcaaatatcttagacagttaattagatacaagaatattgtgtggttgtgaccaagaaataaaatggacaattaagaaaagaaggaaattaatcaaattgtgatcgtgaatcccgaggaaatatgagactggatactttaaaagtctagtcaaggtatctttcaagtttcatgtctattcttttctattcttattttcctttataactgtccactttttcttatttttataaatgaaatgactaaagttaaaaggatagaaaaagaagaaaggatgaatgaaatggaagattaatagtataagtgatacatgatacaactattgttaccttatgcacaatggaaaacagataatgttaagcacctgaagttgtaataggctaagaattagattttctgacaatccatgaatagcttatagactaacattgaagcaaatctacattaaaataagactaaaaattaaataacataaagctttgaccatcattctctcattcttttaataaaaaatggcattgcttaatcatttaccatttcaattttcagggcattgcttaatcacttttcaacacacctaaacaaaaattcagatttcacagctatttcaaacacaccgtacccttagtattttattgtctcaaataggatggtttgtatctagaagaagatatctaaatgaaggggggaaaaatgaaggagagttcattgaaagaataaagaaaattctcaaactttgaaaatatcctaaaccagaatctaatcttgatgagtaccaacatcctcttcaattccacttgtacgttgaaaattatgtcattcctatcaagccatatagaccaaatagcaaccaaccaaattatcattcaaattctccaaagagttttcccttttactagacccaaatgattagtgaagtgagttttccctaattcagtgctactataaattatgtcattcctatcaagccatataaactttttattaaaacttataaaaaataaatacaatgtatatttatacttaaattattttttttgttatttttaatgatataaatttatgtataaatattattctcattactccaaaatcattgcacgaaaagcattgcattctacctactacatcacattattttcaccgaaattcatcatgatcttatgctaagactttcctatacatgccatttacacctttttccttcattaatccaagcccgtaccaaatatgacccctaaacatgctagtggagtgaaactccactttcctcgatgtaagccaattctaggacaacataatatttacatattcaataatttccatgacttgcacttgattgtcatgaagaaactgttatattaaccacctgccaactatccccatccactcataagcatgttcaagtataagttatttaaaaaaaacatggaaatcaggtaatgcattaagcaatacacattgtagacattatttaaataatataaaaatataatatatattattattagatttttaaatataaattataaaaattagacaattaaatataaaaacaacaaattaaattaatgtcataacttatcaatagtgaacaaaggaaattaaatatataaaactattatgaatgacatgtctggaaggtaaaagaatgaaaaggaatgaaggaaaataactaatattgttctcattatttggtattaaatttttccaacaaaaattaaaactaaattattgttatgttttaaaattgttataaaaattttatgtgatactatacatatataattatatattttgatatatatatatatatatatatatatatagatatttacctctattatatgttttattcatgatcaaatattcttttaatcaagcttcttcgaattcctggaaatatatgcttatgtaattatgcaaagaaagcaaaaataaaaaagatgctagaaagctacatgtaattaataaactgagaggcatacattaatacaactaaaaattcatatatttgaattatttaatacactaatctttaacacttacaagttacaccactaaataaggtatacttaagagagaaaatattaattagattttaaaattgtaaaaatcaattatttttgaaaaaaataaaaagccaagaacaatctggaaaatttgacagtaacaaactacaatttaaaatgcataaatgacatcaaaagatgacattctacatgtctgccaaaaaacaaaagagtagcgtgcgcacacaatgattgccctttcgcctccaacattaaaggaccaatagcatctaaaatgaacagatttaaattttgctctcctaaattaatcaaatatagagctaatgaaaagcttcatatttgagctacagaagaacttaaagtctaatttaactctaccagtctacttatccattacgttaaatgtgtactcttacactacaggttaaaagagtatcataagttaagaatcatatttaacaattatcacttgtcaaacatgaaatgcaacagttttctatataatcaattaatattattttataaatatgtgaacaaactaatgaagaataatatgaattttctactctttatttttttcttaatataaggcatatgattaatttgcattattactttgtcaaatgcatagagtagaaatgaaaaaaaatatatatatacaattttaagctgaaaaatacttactgatgccaaatggcattcaaaaaccatattattataatttgtagtggcggtgacagccttttgagactcagccaaagaatgagctattacaaatgtcccaccagcaggaagttgcaaatctgttgtacagattgcagagcctatatgttgtgtgacagggggtagcaaagaaagtgagacaagggagtttgattataaaatcacgcataatccatcccaacccaccttcaccatttgcagtgatcccgactaggttgtcatccatacaacaacccaacaaggaagccaactcccgaatttattaaatcaaaagaaaatataggggatctacaattgtaaactgatatacaacctacaagtgtattcagtgcatatatttttcaagattttgatacatgatatatatgttttgtagttgatttagatcaccatgggattcttccattattcatgactctttccaaacaaaaagataacaaaccagcataattattagtcttctagtcctcaatttgtttttgatccaaattcttatttctaaacgctatacatatgttttcatgaccaatgctattattttcctaatttctatgcataagtaaatctacaccaccgttagagtgctgcagggctccatcaaacactgacaagaaaacaagttaccaaattcatgtttattcatcatcaatatgaaaaacagaaaggaaagaacatacccgaagcctggcaatatttgctgtgatgttagcgtttttaatcttaagcctctgcaccctgatccacaaaattatgtaacgaatcctcatctcctttaatgggaaagaagattgtctgttagcaagaatccagcaaacacacaataatccaataattttcccacaatccaaacaccccttagccaatgctgtaataccctaaggagtattatcttagctttcattttaaccatcaaatgtggataataaaaaaatatattattctcaagtaacatcatcatatacatatcaaagggaattttccaacataggaaaccatataccaaaggaatagcagaggtacaatatttttatcttttattattgtcttcttatttctctcatattctcttccaattttcttttcacctaacccaaaacaagttaaaatataaatttctttttgttcaggtagccttttctcagttcattccaagatttgattttcttagctcaaatttctccttaattcaattccaaagctgaccctgcaatcttcacttaaattttgtatggtttttgtaactatacttgataacattctaatgctgccctgtatggaatcaacaaagttttcaacattttcgtcaaacaaaaattccattgatgcccttgagcccatatctcagattctcaaccagaattctcaaccagaattcaattcccatttaaataattttttaaaaatgacaaacatttacaaattgttctcatgtacaaaatacaaggacaaagcatgtgttgtaaatgttaaccgtgtaatctaggaagcatgaattatttaattttagatggaacattgtaacagcaacatgtatgacttcaactctaaaaggggcaccaaagtaagtgttgcggtctgatgaatggaggttgctgtcttttgttgatcatacttcagattcacaatagctaactatacataatttgatctgttttaatttcatttaatgaaatacttttcaaaatcattttaatctgcctcaagagtcactaaaaggcaggttcatatgaagctattacaatgttgtttgaagattataggagcaaaatagtttaaatcgtgtaacagataattaaacttaaatcaatatgcaagtttatttaattaaaaattaatatgcaagttaaaagagataaggctaattttttattattaataatagtgatttagataaaatcaaatggagaaattacgctaggttgctgcaactaatcacaaacaactacattaataagcttaatgtatatattaatctgctaaaaatttaacacatttttatgtataataaagctgatattacctttgtggacctcacttgcttcagagatgaatccaattgccgttcaagatgctcaacttctttggtattcagtgggcctaagtcttcccctaaaaggtttctgcagcagcaggggcaaatgcaacggtcaaagaaattaaatcttgccaaactaattatgaaaaaatatgacaactttatttggtgaaaggaccactacaagttttttctcagatcttaaatgttaacgcacaagaaatctgtagaaataggcgaaagttataattgttataatcacctttgggtcttttgaagtgattcaaatcttggtttcagcttcaagtattcacggtagctgctctgctacaaatgaaaaataaccagaacttatgtttaagttttgaacttatataatcatgcaatgcaataacttacataacactacacgcatactagctaccttattacaaacacataccctatttaacttaaaaatctcagataaggggacctccaaggctccaagtttgtttgttgaaagctgggttttaaggtatgtatcagttcgatggtagaataaagctgagaaacacgcactgtgtcaatcatatacaagaataatgaaacaacttctttaattaggtgtgttgagtaatgaatttaatcaaatacttagttatccctaatgttctgtgaaatgttgttacttgtttgtgggactagagaaaccccaaagaggcaaagcgtacctggtcgtggctggtgtggtgctgccgtgccggcgcttggtggtgtgtgtttggcttctgagtcaccggagacagaggaacaagacaccacaggttgagcttcgcgggactgcggtgcgctgatggaggaagaagacaccaacaagacgcgtgcgaggcaacaaaacgcgtgcgacggtgcgctgatggtggttgagctcttgctgcggcgacgacacacagggtcagaaggcaacatgctttcacgaaacaaggaccttgtgtggtacattagggttgggccttttgtcttccatataaatgaaatttccgacggacagaacggctatcgaaaatccccgtcggaaatacccaatttttcccacaaatatgctttgtcggtatcgtccgtgggtaacgattacaattccgacggatttgtcattgccgaaaatggtccgtcggaagcaagcggtttttttgtagtggaggataccggctagttgaaactgcctgccagtttagagtggatctccacacactttgcttggtcaatttgaagccctgtccacaaaacaataccacagcagccatattatatctacaaacccaaaagagttcactaaacagtgaaacaaaatataagaatggtgaaactaaaacaaattgcctaattaagaaaggggcacggaaggaaatagaagttaatgacaatgttaaactgtcaacattcaatatcctcttcaagaggaaatttcccagaaaaagggttcatatatccttgtagttactgtttctgagtattagtattgttattgttgtctcctatacaattcaatttttaaaatgtgagaacaaaccttcccatcctgcaagtaccattacccacaactatgacaacaaaaccaaaaactaagaatttcccaactctggatgcattttatcagtaattaattacaacaacaccacaaaaacaaaagcaaaagctttatcagtaattaattacaacaacaccacaaaaacaaaccagcaaacccacatcaccaatgaatgtagtttacatgaacttcataaactgaaaaacagcttttttatgtacgcaactagaagcagggcactaaattcacatcatctactcaccaactctacacgaacttcatacacatcggatctaacaaaatagagagaaacagtggcaaacactgaacaataagtaaacgacaaacctaaattccttaaaaaaagtaaagattccaaaaactaagaatttgaacgagtattcagtatcatgaaagaagagtaaaaacaacagagaagttttaaaaaaggtgatataattgaatcaaaacctgatacatcaaaggcggtggcgccatcaatttgtgccgaacaagcttccacggtttctccgcgagtgacagagtgggccgaagccgatttgtccctgaagcaaccatttttacgaacaagatatcaaagaaagccaaagccaaagcaaggaagtgtgcgatgaaataacattgggagaggaatgtgggacccacgattgaggaacgcagacatggacgttgcagaggccctggtgcacgagggcttcgacgaggtgaacgacgcccggagactcaatgccgttagtgttggtgaccgacacgatgggcttcgagttggagttggagccatcgttggtgagggaagagggttctgagtgtcaatttgagggttcggcattgatgttgggttcttcatgttcttcttgttcggggcgttttcggttgagaagcacttcttcgaggcctgcaggcttcgcgttcttcacggaaccggacgacgtcgtcatggggcagagaggaaagagttggattggtagtaggttgaaaacgcggtgccacattaaagattgggcggtgggctgagaagatgaagggttttcaaatttttatttcaaaattttggtgaaaaatacaattatttcggatggaatatattccgtgggaattataaaaacacaatttttatttttgcgaagctcttcaacactattattgttgatccacacaaatattgtagttacagtttatatgtaaccagcaaatcttcatcagtatgatattataaaaagaataaactaaaaagattccagaatatatataattgaagtggggaagatggggtggatggggaatgcatgtggtataaaatcaaaagatggtataaaatcaaaagatggtatgagacaaaaacattcttattgtactttttcgttaaaaattactaacaagtttaaaataaactcaatcttaatttgtgtgaccgtgaatgtgtttgtgtccattttattttatattggagtaattgattttcgcctgaaaacctagctatttagggaaggttttatcctaaccacatttatgttcatgttatgtcctagctatgttagagaagaaaaaatcacatataatcgtcacacgtcacaataccaaaatgatgtgtctcagcttttttagaatgatactaataagaaaatatgttttttgcaataaaaattgtataatttttaatacctcaaaaagtcaagaaaatatgtggtctctatagaaaagaaaaaagtcaagaaagaagagagagaagtctcacgtaagacaattaatatgatagataaattaatgaaaaaagtattattataaaatataataataatagtctgatcctattaaatgaaattgactatatgaatcaatgatgttataataaagcttggtcaaaatcaaattatgagaaattttatttattatgaaatctcttaatattttttcccaatatctttcttgatttccctctactccttttcatatgattaacatgtattaactacattaaccaatttataaatgaatgttatattataaaaaatgttttacaaataatataactcaatataattgaagaagattgtgttgatgaacatatatatctttatgagtaatattattcttactcacttttcccacatcactattttaattggttatcttattctacacttctctctcacacgcttgtaaaatgtgcattataaagttgtcctatgaattccacttttctactaagtaggtacagttaatgtatgaaactatgggatgagaagtatttgctctccctttttgactttttctctttctctctcctctccttgaccttgagctgttgagcatttagcaaacattttcaaactagtaacctgtctgtctccacatagaaaaaggcaccgattagttcatatttggatttaaaaactcgagttgacatagagggtttctcgccaaaaaattccgttactctttaagaaatatcatttatataattttttttccctcttcaagtttaatttcatatatattctcctttcatttctagcattaggactcgggatgaacctagccatacaaatcttcatcatgataaattaaacactattactggataaactaatgacatatacacaatcttccatctaccccgtcactgaaaagctttgagactctggaaaagaaaatgaagtagatcaaaataatataggtttatgttgaacaagtaagggacatagatccgtggttttctacttttccagcagctgtaccatatattaatgaacacaatatggagagaaagtagtgaagaataatgtagtgaaaaaatatacaaacatttttcaccaaagaaagaagaggatacactaaattatacaataaagagaatattatggtgggacccaaattattgttgtgtatcatctagataccaaggcaacacgcaattctagttgttgcacatgcgatggatgtttggggcaattgcattctattcaattcaatagtaagagggccacacattatatagtttgctcgtattttgttggagatgatgtccctttatgtggttatgagaagcctaatagaaaacaatccaaataaaatgtatcaaaaacataaaagaaaagaaaacaacccaatgtctttggtggaatttttttaaaaaaagaactttactgcatttcagattcattctgtagatccgctgtaggttgccctcaggtagtacatttgtggtttctgatcaatattactcaattatgcttttcaaaaaaatatacatatattgctcaataatgtcgtatatacgtatggtgcacatcttttacatcattatttatttattttccctgacaggcaaagaagagcttcctcagctacttcaattgttgtgtgaaagcctaacatttaagggcaagtgcaatctttcgctagttttctgaagattatggataggaacagctatgcttctctgttcatttagtgataaatattaaatacttattagctattgatcttgatttaaaaacaaaccttacgttttcagtcctaatctttctttggcgatgatgctctctctgttacttcttatggtagctaaaaatttggtcaatcgaagtacaggtaaagatgataaccatttaaacggcgctcatgagttctgaccaaaaaacttgtaaagctagctccaaaaacacgatgaatattttccattttatcactcttccagtcttattcttaaattaaatttcctctgacgcttgcttcgaaaatccttatttattttaatattaagcaagtttggaacctgtagctcaatattaaagagtacataagtattcaaaaattgtgttgctaatattttcattttctcttctacaatttcatcagtaattcgcttccagtttaatagaagagtaaccggcaataaccaaaagaggaagtgtatttagagttagacgttgtgactcatcggtttttatttttctgacctttgtagcatacaaaatctacaatttgcaaggcatagaactatagaagggtttccgctatatatcagctctacggtcatcgtggctgttgttaactgttactgagatttagtcgttgtacatttaataattattagcggtcatgcgttaattgcaattcctgccagcctgtaatgttccatttttatgatgacaaccaaataaatgttgcgttggaggctttacaacttgaacccaatttgcaagagtgctttaatttctaatagcatctccaaatgagaatttcttaaataaaatttttaaattattttttatggtttctagtattttttgttatattattataagaaatttatagataattatactccaatgataaaaaaaactctaaaaaaatttcaaaaaatccacacttttatatttttttatttttccttaattatgatattattgtgtcaagataaatattattttttattgttaaaaaaacaattttttgtagaagatataaattttatttacagatttattctaatgaaaaagaaattataagagtttttttcacttaagaaatctttcaataaaatctgaggaataagattgttttaggccattgtgtattatctaaactgggagtaggaccaccagcacacggcaacatccatccaaccaaattttcctcttcaggaaattccaacaagatttagcatcaataaatgttttgcaagttctctaacaaacccctcatcataaaattgatatgcagtctctggagactccaactgacctgttagttttaccacaatcattccatctatcatagctaatttctttgggattagtccagcaaagtttccaaaactgacaaaccacacttctttaatattaaagataaaaaaaaatacaaaaaaaaaaaactattgtttaaaatatggctttagttgtccaaaaaaaaatgactttagtctctttaagtacgaattcatcttatttgttacttttattttatcattttagttttaactatgatttattttagaatattcacatatcagattgagtcatatttatctaaattcaagatttatctaaactcattaccaatccaattaaaattttaaggttccgtcagatctatgcaattttttacatattcaactcaaaccaacttgatcatgatagaatctgaatatttttaaaaaattataaaaattacaatttttttttgaacaatttctttttgcttaaaactttgtaagcatatatttccttcacccataattatatgattcttttaactaattcacattccttaaaaaaaaataaaagctaatttaattcatctcatttaacttgtcaattatttatattatcattcctaaattacatttttcttatttctctatccacataattacttttaattaatgtttgaaaatagaataattaagaaagaatatgtaaaaataataataaataatatatctagaagtcttttaaaaattataaaaagaaacaaataaattttaaagagtcttgtaattaaaaacaaaagaagtaatactaaaatgcacttttgagaccaaattgtgataatatttaattaataataatttcaatactaatacaatatatttattttagataaaatattgtattaactagaaaaaatataaacaaaatcaagacaaaaataaaaccaactcaaaataaatcatagacaattaaataattaattactataatactaaatttaattatatggtataaattgaatcaaacttaaaaggataaaacatgttatctaacttataaatgaacgagtcttaattgaattatgctaaactcatctcaaacacttaaaaaaaactgaatataattaaatcagattgaattgcaactggacccgaacatgtgaatatccctcattttttcattaaaactgttatttcatactttattttttgaatttttaaatttaaatccaaaaataaatcatccaataacttttaattaggtaatattatgtcaacttattctgttagattaaaagtttcattcacaaaattttagattaacccagaatgatttgatacctcatgcatgtgtatcattcctacatactggcaggatcaaccgggtacctcattcatgtctatcattccagcatactggcaggaggatcaaccgggtagcatccactaatgaccatgcacaacttcatttgacatgacaacatgaaagccccaaaatacaatcaacaaaacgtgaaaaggattgcaggaaggaatatccgagaaacaattggttgcctaacaaaatttttaagtacttaatttgtctgtcgacaaggaagttataaaactgcagctattaggaccaaaatcaataaaataagaggatatggaaacaagaaaaacacccctctttcctctagaagactagctcatgaggtttcacgccagcctttaaagaaaacctggcatacagataagtcttcaaatctggaacactctcgatggcttttatcaatgcagagtcaacagttttctggtcatctttcttctgctggggcaacacactcttttcctgcattataaagaagaaaaagacagagatcagcacgcagaagcaactaaaaataacaagaacttcaacaaaataagaaaatagacaatcccacctccttttctgcctcaaagaactcgccctctcccttcttcttcttcttcttctgggcttcctttgcaaagtatttgtcatcaaactggtcaacattaacagcagacacatctactttggttgatgtgccaataacatacgactgattgacacgtctcaaaggaactccattaatcttgaaaggacctgacgttgcaagtgagaaacataagccaaaccagaaatgggtggagcacagagtacatctcagaaaagcagagtctagtaccattaaaatttgagatcaatatgcatcaaaaatcaatgtcaaacaacgacttcaacaatgactaatacataaattcaattgatgataacaagagtcaaagcataagaaattaacaatatgctaaagtaacataattaatgacaaaactcaccagtcacaagaagcagcccagaaggaagctgcttcaaaaagactaccctctttcccttaaatctaccggcaagaagaatcaacactgtcccgggagtaatgctagccctgaacacacacacccaacacaaatcacacgccataagctacacatataaataaaaaaatgtcattaatccaaagaaattttattaaaaaaaaaacaaacttcattttatcaattagcagtaacatgcatttcactcaccagatcccaaatcaatttactagcatcatcataaaataagtcaaaataaataaaaacacaaataaaaaaacaaattaaggcgaggatgggattgacgtgaaaatgcacctgagcttagcaggtttcggtttgtgcttgttgacaaggggcttcttgatatcatcagcagggtaaaatttgggtggtttttcagcaggagcttcaggtttgggtttagggtcgtggcgaggtaaaacgccaccgtttttagccttgatagcccaaatgcccctcttgtggtacatctgcgacctcgagtactttccgattccccttatcaattcaggatttctgctaaccttacgtgttatcttcggcgccattgctgcttcttcctgctacactacaaaccctaattatcgttcaatgcgcaaatgaaaatcagacatacctgctctgtataaatcctatctaacgggccttgacccgactcgaagggtccatgttccaggcccaagaaatgttggcttacgtctgtggttccaagcccagtctaatatgtgtccataaattttttaatatgccgatcttcattttactaattaaaatttaatttgtttaaattgacacgtgccatcaaactatttaaatgatttgatttttgataagtaaggtcttagttttggatttgtttagatgagagaattagtcttattgtgcatgatgtccgactcaaataagattgaatattttacctatggtttaaatgaaaaaacatggtttttttcctctttgtctcacacatatcatacttttatcttttaaagtgtaaatttcatttcattcaaattcaaaaagaaacttttcatttttatttatacttttttttagtatatattaaatgcatattcaatttattatgaagaaataatacttcacgtttatcagcttttaaaaaataaaggattattttttcaaatttagtctaaacatgaatattaaagttttccaaaagcaaaattacttaactgcaagtcaatagaaaattctaaaaagccgccaagggcaaaaaaaaataatactcgggaaggctcattcttgtcattgtcgattttctaatatcttaaaattttatgaatgtattatggaaagatttccatgtaaacctaaacttgggtcttgaatttggcaaaggagccactttagtacgtaaaattaatgaaacaaaaaatattctctaaattcgtaattcgtcattcgtgttattcgttttattaagtggaacatcattatgtattatgcaaaaccttttgctattaattagattatgaatgttatttcacataaatattacgaaagcactcaaggtgcaaactaagatatactgtcaaaaatagcatacacaagtcaaatgttcacactaatacaataatacgtagtattcattttctacaaacacttaacaaaattgacccttcagattatgaaagacgtgataactaaaaaaaatcctggacgcaaatttgacaagtttagaaaattttgcatgataattgtaatcttaaaaacgctaatgtaataacccgtgtcgttttagaacaaatattcctataaatttaatattatttacattggagtatggatgacctattaatattttatgcccattttactactaccacggttcttgataatagtaccattcaccagccttgccacacgtacatctgtttccaatttttttcattggccatgctaaaggtctacacaatatctaaaattcacacaatcaacaaaatttaaagagcacgcgtcacaatttgactaacaaaattttaggttcttcatttgtctgctaacaagaacgttacaagagggcaactataacgaccagcatcaataaacaaacacgatatcaaaaacaagagtagcacccctctttcctctagaagactagctcatgaggtttcacacccgccttcagagaaaacctggcacccaaataagacttcaagtctgggacactctcaatggcttttaacaatgcagcgtccacagttttctggtcatctttcttctgctggggcaacacactcttttcctgcatcatgggaaaaaagaatgcagagatcagcatgcagaagcaagtaagaataacaggaagaacatcaacaaaatccaaaaattgataatcccacctctttctctgcctcaaagaactcgccttctcccttcttcttctttttctgggcttcctttgcaaagtatttgtcgtcaaagctgtcgacattaacagcagagacatctactttggttgatgtgccaataacataggcctgattcacacgtctcaaaggaactccattaaccttgaaaggacctgaaatggcaagtgagatataagacagaccagaaatgggtggagaacagagtgcatctcaaactacaattggtgagcaataggtatttaggtaccaaagaccaatgtcaaactacattctagagcacacccaccaacatattactcactagcattttcacccacatgcccagaaaactacacaagttgggaaataaagggatcaattggtttgagaatattttttatttatttcactattaattacaaaagcacctccttgctttcatttaatttcctgttttcaaaagtttaaagcatcttattattgttttctattttcactgtttcctatacaattttaaatcagaaaatgaaatccctaatataatgagactaacattgtgagaaaaaacaggagtatacaccccaagcaataataaagaagcaacatttacatacaagagtaataattgattattactcatcaagagtaaaataaaaaattcaattgattattacaatggcacatgaacaaaatgcttagcatgcaaaatcttggcactaagaagtatcatgtttaacaacaaaactcaccagttacaagaagcaatcccgaaggaagctgcttcaaaaagactaccctctttcccttaaatctaccagcaagaagaatcaacactgttccgggagtaatgctagccctgaaacacatccaacattctacttagttacatgttagtgaattggttagttataaatttaccctgagctttgtatcagcacattatattattcaatcattaaatttcagagtttcctatagatactctttctactttaatctcaatgacatgtcacctttctaacatctcaaactccaaatcaaatcaattaaacaaactaaactataatcaaataaaaaatacaaaccttaaaatccattacacataacaagtgagaatgagattgataatgcacctgagcttagcgggtttgggtttgtgcttgttgacaaggggcttcttgacatcatcagcagggtaaaatttgggttgtttttcagcgggtatttcaggtttgggtttagggtcgtggcgaggtaaaacgccaccgtttttggccttgatagcccaaatgcccctcttgtggtacatctgcgaccttgagtactttccaattccccttatcaattcggggtttctgctaaccttgcgtgttaccttcggcgccattgctgtttgttcctgctacactacaaaccctaattttagttcaatgcgcaaatgaaatcacagaagtgcctcattttgtataaaccctatctaacgggccctgaccggactcaaaggatccatgtctcaggcccatgagctgttttgtcattataaacgtaacaacatgagaaaattgtctttttttttttttttttaagaaattactttcatgtcttattctcaatttctgtgactctgatttgttactaagtaattttaaaatatcccaattgtatattattaattatacatagaattaattttaaaaaaattgtccatagaatcattgcttagtatttccattaagcggttaatttgaaactaatttattttagaaaaatgctttgaattgactcttatttaagacacagattaatattttaaataatgttaaagcacgccagtccaaattaaaagagattcttcactactccttgtccgaagagctaaaggaagataagttcaaatgtaactatgactcggttgagcataaaaataatcaattgtttcttttggagaggatggatggtgccaccatttacattgctttcttcaacaaaaaattgtcctatccttgggacttcggagtaaagctagaaatacaaattttacatgcacaaagtcgtcggttctattagaagaatctatagttgcaagttcacatttgcattcatgtaccagttaacacataatcaacaattctgcctattagttgagtctttgtccacctaaacttaagcttagcgttgccttccttgaccagtcacccacaagagaacacctccatctctttggtatgtgctgtagaagttcgttgtcatgtttcaacctcaaggaaaaatcactgcacagtctcatcctttgtctacagagaggtgagcttgaatttaattgaatcacaaaattaaccttgttaaaaaatgtcttcaggatgaaaaaagcatgaagcccaatactgttgcctaatgaaatagcaagctatgtacagtttgattaatatcaatcatcaagaaaaaatgtggcagtattaggcacataaccaaaccctttgatctgtagaatcaaattgtctaaactagagatataagtatagagtcacgatgggctgtctctggcaataaatctttgaacttcattattcacttcaatccagctccaacctggttccttcactaccctgctcaaagcaatggtggcgctcctagtggcaactacatccgaccctgcttccatcaacccggccaacgcgctgttgggcatgcccgggtggaaggtccccattttcaggttcaaaccattaaaattatgcccttttttgctggttatttgtttgtttgaattgactgttatttgttggaacttactaggatgatatgaagagctatgtgaatgaaggggtgagggtgttggtacatgggaagagcatagtagtggaagatgagttggacaagaggtgggaagaagttactggggaggttattgatgaagtgatcttcttcagcaagcacactgctgcctccaagaaccctgccctgattgttcaccctattggagttcctcatttgtgccaaggcgatgttccgccccaaggcggcagacctggatgggcagctcttccaaatcctaggatggggccttggcttcgccttttgaaaaaccttgcccaagctcataatcttgtccctgaatttgaggtgctcatgtgtttttttgctattcaactaaattggctttagatctattcgacattcctgcttgcaaatgcatagcttgtttcctatggatggaagcttcaatttttatatgcatttctgagactgtttcctcaatttagaccatggaccgttgaccaataagccaaccatgtttttggagattggtcagtgttttttccttcataaacttattttgtaagcacgttagcaatttgaccctcataaacttttggatcgttacattattcataaaattctattatcaaatttaatgaccctgtgatggaaggctgtaaatagtacattcagatagattatgaaaatatattgactacaaagttttgttttataatgcatcttgactttgggtgaataaatttctactaaatccatttgagaagatatttaataaaattttatgattaacaaaatgctttgtgtgcttaaattagtcactttgtaattacatggcctttattttgaaagctctgtaaattttataagctttctcatactagatctcatattgtatcagttacctgagggtgattttggaattgaaattctaaacattttgtgtgccttatattttctcttggatgtgttttactcaaatgaaatatggatacttactctgctcatccgatctaggaaagataatgtatgggtgggtcacctactttctggatattcgctgtcaatggaagatccaaaccagtcaaaaggataaacaaatgtggatagtggtggaacatggagacagtctataaaagctgcatatgaaaccacttattctgcgtttcctggtggtgaaattcttgcacatctagaccacaagtgagcttaatgagcattgtccttatgccatcagcaatctgtttgtattgctaatgccaaagcaagaactgaatgctatttcatccacaaccacaaggcaccttgatttgaaacacttaatcaatgttgttacttagaccacaatctgtttaagactttccacctaccattctcttgcagtaatagattgtaaagaaaaatggtagaacagctttctttgggttagggaaaagtgggaaaagagtgataaatccttttccaccatcccttccacactccctgacccccactagttcacagcccttccccactaatggaaaatgtcagagaacaagttccttgtagaaccaacctggaccctacctagttcctgttcctgccattggttatcatgttcacttgttaagatttaagagtcatctgcactctttgtggtgaggggactagcccaaaggttacccactttccaaattaattgtcatatacactccacatcccctccattgctgactgatttttattactgggtttgcttgttagtatagtaatttgcttaaaactaagttaacacttcggtgctatgttcatgtcaactgcaaaattttgaaattcaaatgagtctggaatgagggttttgtgcactaggagaaaaaggaagaaataagaaaacactattttagcagggtatgctgctgtcatattgaccttgtttttgtagccaattacacatgtttgtccttgagtactaaaatgatgatctggtaatgctagaaagcgatattcttaggagtacattcatcgtttcctgtgtctgtcatttgtttagcttatttatggttttacatgaaggaagaaggcatgttatgggcatatgttgaaagttaagaaaactaattatgattttagctgtgccaaggtgatcccagctttgacatcaaagatagaacctaataccttttgcttttacacaagttaatctttaccctaaactagttctttattgcaggagtttcaagggctggcagaagaatgccataacagaattccttgcggagcacaacattaaaattggaaaacccaataacttctattgagtgttgaccttggtggatgctatgtgaacaacatagttgaacaacataacttctgcagagtgcagaatgagtcaggctgaagattttggtagaccatactagcaatttaattcagttctctttagatcacagtgatagttaatgaatgactgaagtttgagataaactgatatatacctaaatccaattcaaatgaaaaacaatatttacaattacattaattaaaaccatataaagcaatagtactttatagaatgtttgcttttatgtaatgtttccaatgtttttaatgttagaccagtcattaaactgatcaatgattcaaccgtgatcgaattggtattgataataataatgataatattgtaattttataatactaaacactaaaataaaacatcattttaaatgttcttgatatttgaggttcatataaaagttcaaatcaaatatatcttaaagtataggttgaataaaaaaaaaagtttttacaaaacatatgttcattgactataataagtttatgtcgaaaaaaaatagcaagttgatataataaaattattagaaatcaagatataaaaaatgttaattaatataaataattaaattatagttttattagataaaaatttaatagtaattggtaaaataatttatacttatgtaattgttattaaatatgctttttttattgaccttaaaaatgtttaagaataaatgaaaaattaaaagtactaatttaaaccaattaaaaaaaataagtttatatctttattaatttttctctgttttattttacttatatgctttatttgtttgggtggagtgacaaatgaatggttaaggagacatggaaaacaacttcatataatttagactgttcatcgtttagaacattctaacaaaatgaataaatgggaagttgtttgtcgatcttatgtcaactttatgttccgtccaatttttcatggaaaggaaaagaaaaagaaaatacaaaataatacaactttacttatatctcatttttaaggaaatgttatagcattctttatttaacacacacgtttaaggtttcttaaaatttgaaacacacacacacaaaagggaaaccacttaaggacaatcatgtagattctaaaatatttcaacttttgacaccatagctttatattgtcaaacccaaaaggaaaccacttttatgtaacctgccaaagtgccaagctacttgtatataaaaccttatctttacttttgatgaaatcttaaccttatcttggatatataaaaagggataggaataattaatatagggggagagtacattaaataaaatactaaataaaatttggcgttaatgttgtcactttatttttattttacatttttttacatttataagctataatttgattgaaaagtaggaatttgttgtgcaatttgttctatagaaattttgtgggggaaaacgtgatatataaattgatttacatgcgatttgtttaattattaccttcaaatatattttatttttatttattttgaattttgcttcatcaggagaaaaagagaatttgattaatttaaaattcagttgagaagtaactaaattctgaagaagaaaaaattaacatgatggttttgaagagcaaaaagtaaatactactattcaagaagagaagtcttcgattatagcttatttatatatgacacacgagacaaaactaataaaatcatgcagcaacccgaaatcccaaaaaaagttaaaaataaaaatcaataaagacataagtgggtaggtaggttttggttcacaaatattaggtaagagctttcttctaatcaaacatttcaccctattagtcccagtagaagatcttaaatctgattaattggccacaccaagaaaaggagatgaccgattcaaaagtctaagcttagtcttcatcaaaataatgacctggacctactcttttccattgtgccgacgttttttattctcctcgttgcatcaccgatattcccacacattatagatgcaaaatacattttaatccacatgtgccagcggattttccgtttggataacatattaaaactattttatctatcgtgtcacacgttttaatgtgaatttgtagttaaaattataatactcgtttccaattacatttaatttaagaataatacatcaaattagtttataagattacgaatatccatcaatttattcattgaaattacaaaaaatgtcatcttatatttattaaaagaataaaatatatatttgatccctcttgtgaaacccggaatttgtttcttaaaaaaactttgtcctatgttatttccgttaaaagacccactgtgttcatctaacattttaacgtctacctttaccaaattttttaaaagcattttacaaatgcctcacatcacacataatttgtgttcaaccctgtctattactaagcaaattcactaacagagttaatatattagatgaataaaaaacaaaagcatattttactcttattaaaattaccaaacatagattgtttttaaatctttattattataacttcaataattataataactgtcattagtaattttagagagtaaactgaattttatttaacaattttataattaaaatgaaactttgatttttttaagaagaaaaaaatgaattttctataattttaagaactaaattgatagatgttcaaattttcgtaaactaagttgatatattattttacattcattcaatagtttaaaatcaattatatgttaatacaatacaatagtaaaatcagttatactaaaataatgtttaagggattagaaaatttgtagaagtatcacatgctcacataatattgcaaacattgatgactgtcatgtgacatgatcacttaacctattgttagatacataaatagttaacaagtatcacagccaatagtggatccataaagtttttttagtaggagaaaaaatagtctaatattttttgaaacaaaaaatataatctttattaaaaattataataaaaaataaaaaattaaaatttaaaaggataaaattaataataatttattattttttatctttaataactatttacattcatcttattaaaaaattatcttataagaataaaatttatttttctattagacaaatttttctattatatataaataaataaataaattatagtggggtaattgccccacaatgatgtatgtgcatccaccaataatcacaataattaaataaaaaaaaagtaattcttgcaaaattaataccagagtgcataaactaaacaacaaattgtgaacttattattatcgagatatgtagattaattagtataaagttatttaaatttaaccaataatcttaaattttaatagcagcatataactatcttaaataataagagagttatattgtctataataatcctacaagctcaaatataataatctttaataaaaatatatatagtccaaaaaaatgtaaaactattaatgtcaagtaaaacatattggctaataaccggtattttatgtagtcaaactagcatatgatgtatgcatgggtggaataatttcctccaagaggctttacatctctatatatgatatttaaaatttgacttgatcttatgtttgacaaattaattttacaatcatcttatatttttataaattaatatatttttaaaaaatattagtaacatttttttattgattaaaatttattaaaaaatataatttttatattttttaaattgtttttgatacgacatattcattaattttaatgattattgattttcatctagaacttaagtgaatgccattgataaagtcactattctcaaccacatttgattgaatccaaaattttgctattagaacttatttttacttaagccaaccaacgacgtagtatacgtttggagatccattagaaaggctacaaatgtattgaagatgaaggagcgatcgctatctcaccagaatcgttgtggtgctgatgttgcgtcaaatttgtcactctttctttgttggaaaagagaatgcacgcactctcctacccgtacggcttgcaccactacttccaccaacttcccaactcgtggtaggtggtcaccagagcacgtgctactgccacgtgacatctccattccgttcccttttgcctgcctaatcagcaatctggacaacaaaacccttttattctcctaattaatttctaaattcttattcattttaattttggttttcttattttcgtaattttaaatatagtcattcagattataaatgatcaaaatgctcattattaaaagtaaaaccaaaatctaccattcctggtcatactcacaccaaatcctaatgaacaaattatttattcactttcgtactcattcaatttataaccattcaatcgataaccgcccaaacgtataatttattacgctttacaataataaacacacattaaatatgacctctatggctcaatgtaattttttggtaaataaaaaagatgaatgtgacttttttattcatattaaatatgacttctttttttacaaaaaatatgacttctatgtagttgatatttaaatattttttttactatatatgcctcattcaattcaataacactttgagttaagttaataatacatatcaagattgtaagagagaacaattttctaaagatttggtatctacaaaatgtattattttttgaaagagataataaatttcgtgcaactaaatctaatacactaaaatcagtttaatagtaagaagattctaatttaatatgagaaaataagatatatattgatatttttatattattgtttatagtttattaactttgataataattattttaaactcatattaaacatgatttttaataagttgagctgatacaattttctctctcccatttgttagtgatcaaaagaaggaaaaataattagagtgcggaatggtgaaaattggattggatctctttaggcataagaaacagaatgagagggaattatgcagaaagaaaaataatctgaaaaccatttgacttcacaatcatccctttttccagtctgacgccattttattattcattcatatatattaggctttctcaccatccattccaattactattagattctgcttcctcagcagagcacctcttcttcacttcctctttactattacttcaatttagtgattcgttcgttctggattcagtcgaggggaaaaaactgcgtggtttgagcaatggatgttaaagctgcacagaggttacagctttcagcggtggttcaacccgaaaggattgggagaagaccaccattcagtacatgtcgtttgggtgtgtctcgggaaccacatagccttcgggtttttgtttcgccaacgatgatgcggagcagaacaaccgctttggaagtttcctgttcttacgacaacgtttcgggtttccattcaaaccaatcaccccattactttattttattttattttaattttgctcttttggtgttgttgaatttcgttcttgctgctttccacacgcttttgttgttgaagggtcattttgccttattttattatttaattttgctgaaaggattgttagttctgagctatctttctttcaaacaaaatgaaggattggtatttgggttaggaagtgtaaattgtcaatgaatcggaaacaacgatctgtccttttcgtgtgccatattgtatatctgcctccaaaggtacctgataaataatatctcggaatatttggtctttaaccgtgccaaatagcatcgtatggtgtgatccatgtaggataaggcttttgttgttgttggtggtggtggtgaaaagattttacactatcaacaaatagatagaaatcatcatagaaatgatttttaaagtaattttctggtagtcaataattttaaattatatgacagtctatgattgaataatagtgtgaaaaaaaaactttatactggtagtatattctaattaaattatagatattttgtccatttcattattttcctgtctgaattgtgtacataaacataggttttcccaaggttgtgttttatttttccagcaatatctatattgaaaaacattatatgattaatatgaaaagataatgctagtggtcccaggttttcaatccagcaataactacattgtccagttttgtcttgaactagcttttattatctgcagattgaattacttttccttttctattgattactgattagttaagaaaattatgttaccacatcttctgagggaaagcatggtgtttgagaagatgtaatatgtattatgcctggattggatctagtttcttactggataaaacaagtgctgcccattttgaatttttacatattattcctaatgttattcttgtagcttcaatattggaatctggaagcatttgtgctcctcttgatgaagagctgattctaaaggtaaaacaatgatattgtttgtcattttttgttaatttagtaaattcaccaataaattaatattaggtcaattgttgcttatttaagtatctacatgccattatcttacttgaatcaataaaattgcagaatagatcacaggagatccagccatatttaaatggacgctgtatttatcttgttggtcagtttcttggttgacttcttgtgcttacatggtatgctttggaaattactttggcattaaaaatgctttgaacttgacatgcaggaatgatgggctctgggaaaacaacagtggggaagataatgtcgcaagtgcttggttattcattttgtgataggttagtatgttaattgctcatcttctcttcatggggagaaaatgcatttaattaatagcaagtaaattatgtgtaattggaatgcacaatagacccgtagaataaagaaagaatgatcaatggttgtaaagaagctctattatttttatttgtgcaattatttcgttatattttagtatctgatatgagcttcaaccgaccaatattcatattcatttgatattagagggaactgaggacatgtaaaagatgtatgtgtgtgtgattgtattcaatagatgaaaacagggtgtgtctcagttaagctggggaatatgatctactgatctactctgctgtgtaatgtatctgctcagatctttatgctacagtgtacatgttctatcacaatacaattaatctgtttcatgaccatattagaggtcttgctgaatattttctctattttttgaacttatgggtgtgtagtgatgcattggtggaggaggaggttggtggaaactctgtagctgatatattccagcaacatggtgagactttctttcgtaataaggaggtcagttggaaagcactatgattttagttgttatattcttcagtgttcagagagtgtgtttagttgtgttgaaattttagattctcctgtttgtttaatctcatccagcatcctcatcgtcatctatcttcatattatcctatattataagcagcagtggtgctggattgttttaattggagtggccacatagaaaaagtaggcttacatatgtttttagtccttgaaaatataatttttcattttagtccctttatttgtttttaattcttgcatttagcaatgtgtttttagtccttcattagagactaaaagcacataattttaaaccaattgaggtcagatttggcggaaggggccagtcatccacaaagtagcaaatcaagtaattattatcagtgtctttgatggccagacatgtctgtaattgttgcatggcacttccttgggccgctggctatatgacatgagctcccacatgttcattgagctattcctcttcaacctgtcctgtggcacaattctgctgccttattcctaaaatatggatctgttctgaattctgattttgtgtagctttctcctctcattccagtagctttcttctctattttacatcttcttcccactagtacttcccctgctgtcaatccattctggcaacattgtccagtaatttgcaactgctggtgacttctccagccactctctggtgcctttttcttggtaacaagcttaaagcttagtaagctttggcttgagggggaagtgttagaattatgtgcagttcatttatcacatgttaaaatgcctttagtattcataggatttgatatttaggaaattgcacctatttaatctttgcctatagtgtctatatatggatgttttgactgttgcatgatggaggtactgaataagaaagcattttgttcagatcttactctctagaatatcctatctatatttctctcttcctccccctctaaattcaacagaactttggtatcacgaattgttctggattatttttggggttctgttattgcattcgtcattctgtttccctgcttaccatttcagactgaggtgttgcataagctatccctgctgcatcgacttgttatatctactggtggaggtgctgttacaaggcccatcaattggtataagaattagctcgctggtcgctactgagaaaagtttaaacttcgctctttctcaattaaatctttcctcatctttacatgtgaatgaatttccaggaaatatatgcacaagggggttagtgtttggttggatgtaccagtggaagccctggcacagagaattgcagctgtaggaactaattctcgtccccttctacactatgaagcaggggatccttacacacgggtaattatttatgttccatagtaggggtttttttcttttctaaacataacacattagtttaagaatttaagctaccaagttggaccaacttatcatcataggaatttgcatcaaaattatttttccactaaataattttaccctttggaattcgcattcaggcttttatgcgtttgtctgctatttttgaagagagaggtgaagcatatgccaacgccaatgccagggtctcattaaaaagtatgtctattaatcttttgttaatgttttgaaatatatatatatatatatatatatatatatatatatatatatatatataaaagtgtggaattgtccagaatatatgggaaagaataaacatgctttgtatttattgttgaatgcttcttagatgataacattaaaatgcaatatctgatgctgcttttgtctgtgacagatatagcaataaaactgagcaaaagagatgtgtccgaattgtctccaactgatattgcaattgaggtcttgagcaatttctgcctcatgcccttccttctaactccattttgttggcttcaggcaaactgaaaagttcctggagctaaagttgaatctaacttttgtattgatgcttatcttatgttatccctttttatcttgcaggcgctagaacaaattgacaactttttgaagggtgaaggaggccgttctgcagaatgctagtaaaagctttggtcacaagcttctttttgattgttcatattttttttcatgcaattgcaattaaggtcatgctgttgacctctctttggtaaaaaaaaaagggtagtaatgcaacatggcacttgtttatgcataatttgtgttggcaaattagcacaatccgacagccaatagcaacatttaatttttgttctgtttattgttgaatgttgatgtatatacacatacacactggtaaacgaggtgttgtaatccgagttcggttgatcaatttatgtatgccttcctctaaagaggtttgtatgttgtaaagtgacactcgcatattttaaattctgctttatcttatatttatctcatgctagttctaatgttccatgcgaaagatctttatgaaacatattgttttttttttgttttttttttttttaatttttagaacgtttcttattttaacggtcattgtagggatgaaaatgttagccgctgtattgaacttgtttattgaattgcagtgtcatcacattagtaatttgtgcatttaaggacatcttatttcatatcattaggttgatatcatataaataggagttttgtgagatccaactcttcacaatatcttctgccaaaaaaaaaaaaaaaaaaaaaccctccataataatatccaagatctaacccaacatatcttcttcccaaaaaccctccataatatccaagaccaaacctaacataacgtttagtagcctcggctatgtaggaaaattaatacaaggtctgcttttaaagaattggaaataaaagaagcataaaaaatacgtaaagaaatttggagatcaggcatatatgtttagtgaaccatatagttgcttcaagcaaaacatgaaaccgaagtacctaggcccaatattgatgaatattgtggatggctttaggttggtttgccaacctctgctatgtagtttgctcctaatttgggtacaatcttttacgtgggtgactggttttttttttttttttggtaagtaagcaagaaagttgaaagagacccaaagcccaaaggttttttattttttagatgaaaatttagggtgaagaaataacctgtagtgtcccaatataatgcattcgggtttaaagaacacttataaataaacttacatttagcacatgtttagttggtaggcaaataaaaaccgtgtggaaatccggaagtgacattgggttaatttactataaacatgaaaaattaatcaaatttctttcaaatataccgcaaaaccaaacacacgcttacttcatagagatgactataagttaaaacttaaaatctgtcacatataagatgttgctttacttcactcaaccaatcccttgaattaggttttattcaaattagtttttttgcattccttgatattaatttaagagaatttcattaataataataaaacgatagttatttagcttaggtgtccgcatttggtggtacgcatatattttgtacagacactgtaatgctgtcaaataggcccttgatcgaatgcgtgagaagcccttcatacgaaattctggaacatctttgcatatgtaactctatatcactcaagtctcaagccattaatatcttgttaaaattttctgaagagtttaagctattagttatgattgttatttgtttatttgactcttacgaacattaatgttgagatggccgagttggtctaaggcgccagattaaggttctggtccgaaagggcgtgggttcaaatcccactctcaacaatactttatatatatatatatatatgtgtgtgtgtttttcttatcttttttctccttggttggtcctaccaactaccaagtttgaagtccttatctgcaccaagctccaccctccaataatcaaacagcgtagatagcaaagggataatgtggatgagaaccatggctaactcatatcttcttcccaaaccctattattaccataattttcattatcagcaccaatgatacttcaagatcaacctcccaaaatgaactactagtactagagcttcctctgctgcccctggggtcgacctcaacactctcgaatctgccctttccaaggtggtagtttagcatcaaatgtctattatgattttcacaccaaggggtaataaacacttgctttgtttgttaattgttagataccagttgaacaatgtaatagagcattacaataggcttaagttaagaatagttgagataagaattgagctccaattagattctttggctttatatttatgcccccatgaaaatattgctcccagttcagttacaaggtagttactgtccgtgtgtttagattagcattggcaaaattaattttcaaccaaatttattttgcaaattgattttgaagtagataatgctttttagtacgaatccaaattcgtgaaaatttacgagatgatctgattggttaaaaatgttcaatttggatatgtagatacataaaatcctttttgtatagggatccaccgtttatggttataaattcccacttttcgtactcaatttcgtaaggattttttgcactaaataacactactctttgaagcaatgtgatttatgtttgaaagtttttattctaaaaacaggttagtagtaaaatccaatataattttttatattcaatgtaaaagttacctaaagttgattcaatcaaaataagttctagacccataataaattccttaaggtagtaatagaatcaagcatgtgaaatttacctaaaatcacattagctggtattttaacatgattctagacaattcaacgtggaaacaaacatgcacttactgtctagctttggagctgctactggttaggtaaataatagataggtttgtttgtgcagaaagacagtgatgctgttaaagaggcacttaaacagcttagtgaagttggttgggccaagaaatggagttctcagccatatgtttcacgtcgtacggtcagtctccaattacaaatgtgacaaagtgacaactaaacattaagctctcatcaaccattcttggacatagcatccatcatgtatacctgtccagtgcttccactactcattcatatgtaaactaattcatcgctcatacaagttttcaccgttcaaaatttgtgtatcagacatcactccgggagctgacaagtctaggcataaaaaactaaagagaaccttgcaattcctagtgtcagaaatgatgtgagtttcagaaatcttttaatttttagtatcaaatggagtatgtaatatcatatgtaaatatctcaattgtaaaaggggaaactagtaatttctaataagactttcaatcttcaagacatatgtttctttaagttgtacgcattcttaaccaacaagttacaaaaatctttaatggtgcaggcagcttttctttttactgtggttggaacaacaggattttcggctgttctggctgggcaacttcccggggtatcactagcacacttgtgttttgctctgtatgtctgtttaatgatttagtgttgaagcacgcattgtaaatgcagatatgggattcattttgcttgcagaaataatgtaaattattatggaagcagtatgtggttggagcttctagtagaataatatatttatggattttaaatgcttgcttggcaaccagataaaagagcaaccaaagtagaagatttagaaactctttcctttcatgcatgcatcatggtctcactctacatattatattctaacgccaacattggtgatacttaatatactgtattacgctttttgtggtttacaaaatttgaattggaaaaaaattggttaaaaatacttttccttatatttttcttctaactacttcccacacactcaaccaggcagaccttaaaataattttgacatttttttttccatctctgattgatgtgtgctgactcttgtaggattggggcttctttgtaccatatttgattgggagtatctcattagtggttttggctgtgggtagcatatccccagggtaagaagaattgtgtttgccatgtagtaatggatacccctcttcagtgttaaatgttaatttgctttacattaatgctccaagttgctagtgtaggcttctccaagctgctattggcagcttttcaacacttttccctgattatcaagaaaggattgccaggcatgaagcagctcagtttttgagtactgcccttttcttttttgtctggttttcatgcacaatgcatcagatatgtgactttgctctaacccattttttgtttggtcttctgtttcattctagttgcttatctgcttggcctacccattttttactattccctggatattgggaaagaacatgtcaatctcattgatgagaggcttgaaaagcttatctatagcggacagcttgatgccaaagagctagataggtatttatttaccatacagctctaatttctcttattcaatgttaaagaaaaaagccatgccagcttataacttttcaagaaccaagtaccaaccaagccaagccttaataatcacaaaacttgccttgccttaattttgaaagagttttagtcagtaatttgatttttttcatatcagattggctgttgtgtcaatggctggactggcagcagatggtttaacatatgacaaggtggttggtcaatttgctgatcttttcagtctccaggttaagtatctctattttttttttataagatgtggatattatactactcgctattatctcaaataataatactaaaagatttttttttccctgcagagatttattaacggaaccaagccatcactcagcaaagatcagcaacaaaatctcacaagatgggccgtatgttttcaaataccatctacgtttacagtttgataagtaccaaaaataaatatagccctcaaatttatgcatttttgctcttaaaaagctcatgtttgcaggttctctcttgaaaaataacaaggtgactcatgaagccttaatggcagcgatgacgaagaaggcaagcttactggaatgcattcgggcaatcgaaaatgcagcatagttccaaatttaacggttttcagccaagacatcaaaatatagtataaccaaagtttaagaactacaaattacaatttcaagttatttcttgttcataatcactcatgattccagcttcttctttttttatgagcattcaactttccattatttttgtgactgttggtatttgatataggttagtatatgcaagaatgatatattaacataacatagaattgaaaagggtagctcacataattagaggggtttgataaaaaaaaaaaaaaaaaaaaccatgtaaataagaaagcgagacacaatcgtttacactatacagaatccatttaggttcaacacatctatggtgcgcatcatttatttattttactatttcttcttctgcatccggatgacatcacttttgctgctattcttcctctgcttgtatatttctaaatattatttagtattgcatcttagtctaactgtgtctatggtttttagacacattaaatctgcaaagtgtgtaaaatggtaagaatggtatatttgatcacagttcatcaggccaatcagtagggtcgtcgccttcatagaacaaaccatctacgatttggtcaattacggaatcgatgaatgcgttgcagctgacggtgaagattcgaccaactctgtttcgagcactggagaaccatgcaaagagtgctgcacaagttactgcacccaaacacaccccaccagcctctgtgattccttcaatgtccatctttctgaacacagagtttcctgtcaccatttccattgtcaccgtcgcggcaaacaccatctgcaacaaacatataattaacatcatatataatcaaaattaaaataaataaaaaatgatctagtgcctaattctttatttctcttataactaagagtttaaattgcatgcacgagtattaatttaaaaggaacattgacaaaaattatggcaagaaggaaacgggaagggtacactacacttcctggtatttaatttgtaagataattctatattcaatggaaaaaaaatagtaaatataattttgatatatatttttgaacagggaatcttccggtcaacgattaattctgcacaatagatatctttctatatttcaatatataaaaaccgaggatcaaatcctaagcacacgtttaaacaaattatctattaatcatatcataccaagttaattaaatgttaattaatttaaaaatattttttagattattatataaactaactaccttaataatatatagtcatgaataagaagtacaatttgtaaagaaaaacagattaatgatttgatgaataaaattgaaattaatttggatggggttagaacttaaagtagcagtaaaagttgtagccataaaaaatgaatggaaagtgcaagtttttatttatgaatagttacgaaccatagccagacgaccagagatgatctcaaaatcttgacttttcttagaactctcaatatagtcggaaagcgcggcgaagaagggggacacgtcataatcgtcaccctccttgcgggtcttgatcagtacccccgctcgatccgaaccataggatctcagagtgcacaaccgcggctgcaaaacgatgttcgcgccttccgcctccgccgctttgggtttcgggatcgtaacctgaaccggaccggccggttccctcgcccgaaccgcgggcctcgccgatcgcagctcgcagtgcactacacgcgtcgcagatgccatagagagaaaggattttgggagaacctaagaattgaaaagagtatgataggagaggagctacaagaaagtctacgattaccaagtgcgggaccagatagaggaggttacgtgtcagtcaattggttcggcaacgtagctttcgaatgtgaggccaaaagacactgtggtgtcgtttcgacaattttttttcttcttaatcctcatattcacaaaagaaacactattataaattcaaaattccatcaaaagaaatgagcaaaatttaactattaattattttttattaaagattgaattaggatagtatttgaacaattatttggaatatatataaaaataaattaaattatattaatataaatttgataattattatatcatcttataactttgtttaattggataatatatttttaaaatttattgttaaattattattctttaaataaattacatatacaaaattttatattaatctaaattatttattaactcttttatataaattaaaattaatataatataaatattttaaaatataataaaacataaattatttaattaatttttatcaaaaaaatataaatataataattatcaaaattataatgatatatataagttgatcgtgaagtgaagcccacacacacggatgcggggattaataggaatacgtagcaccctaaagaatcagatatatattctaaggtcctctttcttctcttccctacccactcccccaaattcaaaaggactagttcttctatgttaacttataaaattaacagcaaaaaggtggttcaaatgcttatccaatgtatagagcaagtggtatctagagctagagcaagtggatttgtgacggaaacaactgacaaatccaacaaaaagtgcttgtattttctgttctatgtgtaggattaagaaaacatggatatgtcttatgtctttataatttcattatcaataaacgaataaattattgatattttaaaaaaaacctgcctagttatgaactttgcacggtttaataaaatgacataatgaggttacaaatatattagtgttactgtcataacaatatttatcagaaataatttattatcgataaatttacatcacgataaactataataaatctcaataaaataaagaaatttttaaataaaacgttatttcatcaagatttgggtctcactcgtttgtgacatttaaaatgaaggaactgatatttgacaattaaatattttttgtagagtaataatttatgtactgcacagtacaaaatgttataaaccaagtgaacaaaataaagcattttataatttcactggggcaaaaggtactcgaaagtgggagaaataaaaaaaaaatggcaattgctaatttgctatggttttattgcctacttcccaaaagggccaaaaatgcctaaacctccaaaacttcatcccttccttttgtttgctactttccttgcttttccttgcaccaatgaggatttgcctctattccgtttctgcttcagttattttgccccctcttgtctcactttttatcaatagtttgctccttcattggcgaacagtagtcagcatagtgattgaaaatttataactttaattgaaagccttaaattataaaagtcatcatagccgctgaaaattccaaagcatcagctccttcaccatcaccacatggaaaacaaaatatagagagggttaaaatgtcaggactttgaagaagtatatgaaacatatagttatttagtttcagtatcaaatcataacaattagcttgtacctagaagaaatatcaagacttacttaagtgtgaaatatatattagcttgtttgcaaactgcaaatatgtgagaagttcctattcaaatcaagccatacaagattgaaggagttgaccatattaatattcattaatttgcaatcacctatctatttgatattttggacttaaggttcaatatatcatctaccatactctcacgaagaagacagggaacgaacaaattacaagaaaaagaggaagataatagaaagagtgagagaagagtttggtgtgaacccaacacaattgttgcatttcccataaattatttacctgggcatcaagggtatgctcaactcttgtcagttcctatttatacctgttgagcaccgtagaaaatgtctcagatctacttaaacatgtagatagtaaaagagatcaaacaattttaagtacactcagttaaacatgcgcctcagttcttattttcatttagctaaaaagaccctcaagtaaaagaaatacaaaaacacaaagtatgataataaaaattacttaaaaactaaaaccataaagtttccttgcataattaattaaaaaagaaaagagaatcaagtaattcataccaaagtgatgatgggtgtgataattaagaacgatttcataccttgtaacaaatttgatcgactttctcttctaaaaaatagtaattaaactcttctcaccaaactctatgttgcctatttatgatgcctttactttatagagccatcattctataatagatttcacatattattatgctttttagatggaggttggtgattaccaacaacctaaaatttgaaccatttgttcctgcagctcctcaactttccgtgtctcaaatgttgaaagttgtagcttaagctgcaattcatgcattccctttctagagttttcaagctcaagattcacatcatcaagtgctctcttcacatgaagaagttctttttacttcacttattgactttgcatgtccctcttcaagagtgttgagtcactcactatatttattctcggctttaataatctgatcttgaaaaagagaacataattaaaggacgaagtcatcgtcataatacgaatacaagaatgccaactttcaattttgtataacaacaaaagcttgtcataaatttcaaaacatacatttgttaaaagaccaagagaatatcctatatatagaatcaatatgtagaataattactggtggtgatttatggataaaaactaaaaacagattacactccactaactgaaaagtggagtactagaggacgtcaaccctactaatattttctaataagtagggattttttaactacataatatagaaataaatcctaacaaactggataattcaataaataaaattaggtaagtaataaaataaaaatatttagtttaaaataaatagtaaaaaataaaataaaaaacaatttttaatcaacctatcatgttgataatagattttcttctcttaaaatcgatttttgttaaaataatttattgcaaacttgataatcgattaagtttggtgtgaaaacaattggtaattgattgtggaacaaaattaattgattattttatatgacaaatgtgttattgttaaaacttaaaaacttcactattgatcgatgaagtaaatcaacgtgagattctcacattttctttatctctcctttaattttaccatgtcaaacgattgaaatttcctttctctcttctattttgcaccctatctttcctcagcttttgttgttgtaccaaacataacatggtgttaaattacacttatccacaaaacaaataaaacatatttttaaatttcgaaatccataatattgtaatgtatttatttaaattttaaaagagataaactaaaaatacattgtaaattaaaaaaaaaccgagaaattaggaatttgtaagaatgtattttgatttttgtagttggaatcattattattatgatttatgttatgaaaatatgttttgtgttagaatttaaacaaagattttgagtttaattattattttttattagatttttcaaaaaagaaaatgaatagatctttataataaagaatgaatttttacaaaagagatcttgaatttaagatttattttttattagatcttaaaaaaaaatgaataaatctttattatagaaaataaatttttataaaagaattttgaagatttgtataatattaaaaaaagagtaatttttttttctaaaatctcaaaaatctttcactaaaaataataaaaaaaaaaataagaaatcttcaatattaaataatattattaaatttattaaaaaataatttaaaatctaccactaaaaacttttaatccaaaaaaaaaagtagtcatgatttctttttcattatcctaatttgtaccatgtgtggtcatctatccccacaatgcttttaacttcaaagttcaaaccaaaaacattttgctgattctaatatcccactctctctctctcattatctatcttatatctaaactactatgttggattttggagatgagctgactttagatagtttcaggattccatggctcatatggattcaacttttagtgttccttcttctccttaccattctcttttgccactccatcattgctttagatctctctcatcacaccacttctccttctgcctctgccactgattctgatcttcacactcaaccaccctccaaccaccattccactgctgtgaccaaccgtcttcagagcacccgggtacaccccatttccctttctttgctttttcttttacccttttggattgttacgcttcccaacatataaagattgcaacttgcttcctctaacctcttctctttttatattttggccttttgaaataagctaagggtgacagatcttctttggctcatagaaatctaatattttggctttctttgcatatattggttttattttcttaggttgtttaatgtcctctctgacaatttcttgttgatttgttgaagttcaaattaagcttctattatttttctttttcatctgagaaatctaggttgtagatcttctgggagtattagtgggttcactgttacaacacccctcccattaaggccactaactgaaaccttcaattggattttaattacctttaaatggtccactgacttttgtggataactgatttgaggtttcatggttaagaaaattctaggttggtaattaatgtttctggttaggaaaagaaattaaattgactaaaatgttttagttgtcatttactttttctttttattaaaggagttgtcatttacctgttcttaggtttttttttttttttttttgacagtgcctgttttgaagttatgaattatgatcgccgactctttctttgtttaggtacagtagacattaaccaaaaaacgagattgaactttcaacaatctcccctggtccccttattttgttatgaatttaatgtatgccgcatttgattgtcttcccttttcattttcaccttcaaaatttcgaaacatgcataatgatttaagataaaatttagatgtgactttgtaagtacttttgatattgttctctaatcagaattggaatctttgctcaataatcctcgtactaaagatttctattaaatattaatgtgaattactaaggtgaaattctaactataattggagaacaacaaaaatacctatgaaagtgtatctaagttttttctagtgattcaacatttcatctttgaataaaatgaaaaactgggctataccatatagactaaataatctcaacagtcaatcccttgagtcttgactgccacataaaattgtgatggcttgaaagcaaggctctgttgccatttgcttgaggccatcaaccaaagtattcaaatttgacgtttctgttcattcattttatgccaccgacagtaattaccttacctagtgctgttacgtttgacgacatccagtgtgtacatttagttattggtttaaatcaaatatacatttgccttaatattgatgtgaaaagctttattattgtctttaatgatctttaatgccttaaaaaactatactagtacagggtaggtcaaggaagaatatgtagtatctagtcagtattattactgcatttcaaatcctaaatttgacctttctaattgatttattcatatagtatatataactttcagtgaatgattactctttttgatatagtatttctctgttggttgaattagcatttatcattactctatctgctttaccaaaggacctgaaggatttcatcctaaattactgaataatgaaattgatgtgggtagttgtttaagtttaactactattactccttttcaaaaggacaactaataatttatcttgtctgtattgaataagttgcttcctggcatactctgttttctttcttttttgttttaacaagtgttatcctgaacgggattcgaacctatcatctctccttccctttcttcccttcatttttttttaaccattcaaccaatcttagtggtttgtcacctttgtaaataaaaaataatttgggtatggaatttaaaaatgatgttgatatttttatatgagattttggatctataattaatatcaagtcacaagggtgggttttttttcttcttttgggggggggggggggggggttggagtagtgtgggaaaatatgaatatattgtaatattatatttatatatatataataagaacaatttcttattttaaaaatgtaagaattctaaaaagttatgcttgtttatttattcatcttaattattaaaataaaatttaataatttttttcacgataatcaaaaggataaataatctatattcattattctcatttgtcttagtaatcaaatatgcctgtctgagtctctctctctctatatggtcaaaagagagaattaattttgttgaattcctagatccccaataatttatgaccatttgtcaattactcggtgttgattttttttctttctatcttctaaaggaaacaatacattctcttcaaactataaatcatacatgtatattaatcagtaggaatagatcccctctctcatgtcgtgtcatgttttaattttgtgtatatttctctcataagtatattattaaagtataaaagaaagatgggaatctttttgtgtacattgaatctcgactttaaatatattattagatcatatgctctaattataatctaatcataacaaaatttaacatgaaaatatgcattataatttttttccttgtggctaaaataaattgacatagcattacattatacgtagtgacgcagaatgctttggcaggggatagagaacacaagtattaaaggtgagatagcaacgagcgcaagcacaggaatagtgagagaagagtttgcagaacgggaggcttcaacttcgtcactgtatttcctccacccttgctattatttcaacttagccaaagaagcattcctcaaatgtcttggccttgattctacatcatctaaatctgacgctctttcaacccaaaaacattggaaacaaaagaaagttagctgatcatgaaaattatgttcttatttatttatgaaatttttctcatcattttgaactacttttttcgatcctgcttaatttctccaccaattggagttaccagaagtaagttttccctttttatgggtaatgattcttccatcgtgtgaatttgaaagagaagcaaatttttgaagtgatagttaggcaaacaaaatccatttaaatttcttacaaattaaaataattcatgataaagtttatttaataacataggccttgcccatgacttaaaattgctattcccacttgcaaatttatactgggctggatttgactgtacagggcctaaacgaataaagcctagctagcaaagagagaactattgttctcacttccaactgcgctggattttgtgttggttaattgaatgtacaggttagctggcagacgcaaaactgttattcccacttcaaattttactgcgcggggtgaactttctgattcaaatatattactaatatggattcagattttatgttacgttatcatgaatttaaatagattaaaatatgtttttttatttaaatattaaaatgtttgaaattctaaatttgttcatgcaaaattgaaataaatctgaatttgagttattgtaatttaaaatataatttttgatgataaatattgtcacaaattaaaaaaataataaaatcaaatcacaatttgtaatagttaaaaatcgtcacaaattgaagaatttttttttttgcagaaacctcctttctcccaaacccatattagttagggtctaaacatgtattaatgtttaattggttaacaaatcaacttgtttgcacaatcaccatatatataagttcatatttatagagaacaaaaagttaaacattatgattttgcgaggaacaaaatatatcttagtcattaaaatattaaaaaataattatataaaatcatatgtcatgattccatagttaaaaacgtccaactcagtttattaaaaagtgtggattgatagatgttaaaatgtcataattccataaatttatctatacaatttgaagaaaagatttgtatagggacaataataaaaaaaaataaaaaatagaacattttatattatcaataacaagccttttactgcatcatcattattatattcctcttaaaattttgtgcaatatttattttatttgttgctttcaactattgaaagtatataaaagataagttggaatattgttaggctcttgctaaccatttaggacatcgattaataaattaaaataagaaagcttttattgtctaaattatattagagcgcagaaaaatatatcaagagaacctaattttgcgtctttcattgaaaaaaattatatttttagttccttgagtaatgatttttgggcatttgttaacatttactatatttatcaagtattaattatatgtacaagcgctgattataataccgcttgttaattgagtattaataactaaaaaaattaaggttatttttaaaattgcaagaattaaagtactctatccattcctttttacaagacattgtttttaaacttctgtatattttttataagactcttttctaaattgtctattgtattaattaattttagaacaaaatacctttaattaatttatttataaataacagatattacaaattatctatttctctctcatgtgagaattggagaatgaaataattattttaaaaattaaaattccactgttattattctctttccatatattagttacttaaggataattttgaataaataatataattacagataaatttaatactaatgattaaattaattaactttttaataaacgtaaattagttaataatttcttattattagggagaaaaatatttattttgacgatgtttggacaaaggaactaaaatacttttatttctaaattataagacaaaaattattaatttgaattaaaaataattttatcctaaattttaagatattaaaaacatatttaaaacaattaattaattcgaaatccaatctaatgcggtagtaattaaaatccactatttgaagatttaactatagccacgtgcgttgttttcacgccttcaacccgcgttgttttcacgccccccaccctccctataaaagatcttttattttttcatttctgtgtagttgcgtttcaaaaaaacgtgtctctccattttgaatctggatccagcgccttctattcagcattcaccccccaaacccaaaccctatttctctttcttccctgtttggttctagcgagcacaatgaggagaggagctaagagaaagacgaagcaggaccaagaagccaaacacgacgcacccgaagataacatggccaaagctcagcctcgagctaaacgaaccaagacctccaagcctcaatccgaacctgagtacatcgaagacaagcgcaacttggttagtttaattaacacttcaccatcgccgttcaatttttttatttcaattcgaaccgttttctttaactatatgcgtcgaactagaaacgttgtctagaacggaatggaccgcagcagttttgtttattaaggagaaaatattgattcggcgtttcattttccctttcttttcgtgtctagctttagttagctatacttcgaagtggttgtattatatgtgtttaggttttttcttctttttcgtatttgcattgtgttttactaatggaggatggtgtttgtcaatttggattgtgtaggaagatttgtggaaggaaacattccccgttggaactgaggtttgttcaattaatttgtatattttaattcgtttatgactgtgccgtgtttttttatttaactgtttcgtgttgtaatcgcagtgggaccaattggattctgtctatcaatacaagtgggatttctcaaatctagaagtgagtattggattagactgcttaggttttggttggtgttctgtttttgagtggagataaaatgctttattttgactaattgctgatgatgttgtgatttgggggtgtgttttcagaatgcgtttgaagaggatggcgtgttgtatggtaaaaaggtttacctctttggttgcactgagcgtaagtggcttgcagactttatttcttgtcattttgaaggcggctgatttgcttcatagctgttttccctttattatttgccctttcattatcttatgttgatctttctgactgcagctcaactagtcatgtttaaaggggaaagtaaagttgtctgcatacctgttgtagtagctgtaagttgtcaaactgggctgtctacatgtgttggtgacgtgaacacttgatgaccaaattgattcttgcttttgagtttttcaggaaaaatatactgtttgattttgcaagtatgtgatattatgtttcctctagctgtgatttgtgtgtctctccttctggggcatggttctttggtatatagacttagattagatatttaaaatcatatccttaatgccaaggtgttatttggaaatgccagttcattgaatgtgttttgttgccagttttacatgatgaagcaaccttgtatcagtttagatgatttggatatttgtattttgattttaattttgaaaatattacaacatccttctgcagattgtatcacctttcccaccatctgataaaattgggataaactcagttcaaagagaggctgaagagataattccgatgaagcaaatgaaaatggactgggttccatacattcccttggaggacaggtattcatctcaatttgtttgttttggtggtttcttgagtatgtttatgaatcattgcttcttgaatcttgatcatctcttaacttcttcattatggttttatgtcttcaacagagatagccaagttgatagactaaaatcccaaatatttatcttgagttgtacccaaagaaggtatagtcttttattttctcccctttgcaattttgtattctacagtttctttcagatcttctgaatggattgttcttggagaaatatacatacctttatgttattggttatctagcttaaataatcttgttattgtgcttttggctgttctctagttatttttagtcaccattttcacttctcaaggcaaaatttgtaagctacaagtctttcatgttaaatttctttggtgattgcatcatattcttctcctgcatgtagcaaaaaaactgtagtttttcaagtagtgtgaagaatattcaactttctgcgtgcttgtctgtttctattctccaatagatgacttgcttaagtatttatccttggcatgttgcattcgtgttggtttttaacccaaaatgcaaaaatacgtgagtaacgccaggagtctaagccttataaaataaacgagtttgtggatccataaaaacttaaaatggatatttgggtaaaactgagtatttatttcacagtttatttcctataacttgatgaattgaccttttactgtagttttttttttaccttttatttactgtagttgttgacattttaacataaagctttttactcatgcacacttttacagtttgaccttgatgtaccttctttatgaatatgatgactcatcttacctatgttataacctgcggtacagatctgctttaaaacatctgaagttggatagattaaagaaatatgagtactgcttgccttgtaagtctactgcctttagaatattacaattgttctcatatgtgtatatcagttctatctaatataaggaagaagataatgacattttattaaataaaaaagtgagaattgtggattctggacaaagcaatttttttgatcaattattggtgcttcattttgttcaaggcatactgattcttcatcagttactgttaatgttcctaatataatagttttttaatgactgctattctttctgcagatttctatcagccgtttaaagaagatgaacttgaacagagtactgaagttcaaataatatatccagctgagccaaagccggtaattacattaatgaagatttttccaagtgaattgacagtgtttgggttttttgggatgcttttgtgtataatatggttatgtaatgacctttctgaataaatttttcttcacaagatgggcaggtgccctatttgattttctaatttgtaagtgtttacttatttacttatatatcttgtttgcaggtcttctgtgaatttgattgggaattagatgaacttgaggtaatgaattaactttgtggtgattgtagtttagaacatgtcagattaagtcagctagctgttgcaactttaaaatcattgtcatgcttttgaaatctttgataaagcttgatgttattatgcaggaaatttaagggaccatttgatgtgagaagatattttgtttttacttttaggataaaatatgttttttatccctaataaatacccgaataaatacccgaattttgtgtttgttccctaataaattttttctttgcattgagtccctaataaaacaacattttgtttttggtccgtgacacttgtttttagtccgataaattaacaaattttgtgtttgttccctattaatttttttttcatttgttattagtccctttcaaaaagattaataacaagtatttttttatcagggagtaaacacaaaatttgctaatttatcatggaataaaaaaagcatcaaggacaattttttttttttggttttattaggggatcgatgatagatgaatccaatgatagatacgaggatgttggaaaaaaagaagagaaataagataaaagaaaataaagataaaaggataagatgggggaaaggagtggggagataaatacgaaaatgactaaaaagggaccagctggaacatagagataacgtgtctaaccctccaccaagtttatagttttttctacatttcgtcctaagatacatcgtccgtcaatctatatcctactctattataagtattgtttaactacctttctctaggtaagtttcgttctacctctctttgtgtcgagctcttggtaacaaatttttgttcttacaggagcatctagtgattgtttcattatgtgtccaaaccatctcaatctatgttctttcattttttcgcttaccggtactattgctaccttttgtcgaatatcttcatttcttatcttattcatgtataaccacacatccaccttaacatcctcatttctgatccctattttatgttcatgttgtctatgtgctacccaacatttatttccatataacattgcaggtcttacagtttttttatagaatttttttttcagcttaaggagaattttgtggtcacacaacaattcagatgcacttcgccatttcatctaccttgctctgatttttgacttacatccttatcaatctctttacctttttgcaaaattgatcttaattatctaaaaaatctttcttaggtacctcgtgaccaaatagatgcatgtgatcttgatcaccatctcttactagtgaaaactcacattttattaggaagcaaaaatgaagaatttttttattagagagcaaacacaaaattctggtatttattagggatcatgaacatattttagccttacttttaattacaaaatgctatcttgttttcaaatatctgtatacaagtcattgtttcctatacaaatctttgaaaataggtaatagtcaccgtttgctatactaatctttgaaaacagaaaatataatgtgaaagaaaggtgacacttttgtaattaaaacttaaaagtcaaaataaaaaatgaaaatagaaaacatttttttctttccaaaaccaaataactcctaatgttgcttctgtttgtcattctgcacttcctattgctgactctaatgtctgaatgttgctatttatggaattctagaaaatcttgactctgcattgtgggatggggattttgagattggacaaggagagaaaaaatctttatttgccagtgttttgtttgtgtttcactgtttctccagtctccaccttgcttccctcctaatagagagagggtaaaagtaacgggcaattggaaaatcaaatgacaatggacaaaggcctcttagactgctttgttgtatattttgcaggagtttactgataagctcatagaggaggaggagttatcagaagatcaaaaggatgcatttaaggtaccaaataatagaagccatctagttattccataatttctgtgttttttaagtaataagttaggctgatagtattgctttgtttaggaatttgtcaaggaaaaggttcgtgaagcaaagaaagctaatagagaggtacttttggtgctgttggttctgcacattatgctttgatttctgcttgttttttaaatacctttttttacctcttgtaggcaagggaagctagaaaaaaagccattgaagaaatgagtgaggaaactaaagctgcgtttgagagtatgagattttataagttctaccctgttcaatctccagaggcacctgatgtatcgaatgttaaggtaggtgtttaggcattctattattactttgttttcttctttttgatcaaaggatgaattcattgggactaagatgatttcagatagttaggagcatagaatatcctccttttatttcaataaaaagaagatacaaactatggaaaatataaaaaaatcattgatgaattaaggggtacccaatccattaacttaccagtaagagaaaccccttcaaaaagatcatgtgctttacactaaagtagaagccaattgcccaatcttatttcaaggtagccactctattattattcttttttatttatgctgcacatgtcttatttgatgttattgcattaccttattttctgaaaattggttattcctttaatggaacatttaaaacttgtaatacattgagggagaatggagggcttcttagctgtgcctgcatacatgtgtgtctactggaaagcactgatagaaatagatattcaaattctccttttcaactttggattgttatagtgaaggagttgatgagagaagaggccatactttgttaaaaaaatcaactagctattccaaattagaggaatgaaatcattgaaatattaggtgctatacttctgtggaatcattagttccttttgctttttttatccctcttctcatcaacctggttttcattgaatttggtactgcttataatttgttggagggtaaagaaatggaaatgacaacatctttatggttgtaactattttcttcccagaataaatatccctactaatctgcttcaccacaaaatctgtctatttcttggcatgttgtgtaaaagaacataacctttgtgtgcatatattcaatgagttaataaaaaggaagacaattcagggtaggatggcagctgatatagaatatatcaacaatttgttgaatttctggtttattaaatgcattttccttgtacctataatttacagagtatcattatctgtgtttgcagtctccattcattaacaggtattatggaaaggctcacgaggttctgtgattggctccaagacaataatgacaatttttctgtggcttgttttgcctaacacaagaaatgttgtgtttagtatgaagttatgtagttcaggaggtaaccccctggtgccccatcaaattgtcattgccagtgtagttgtctaaagtgacatataccatgtaaaactgtaggtcagagatcctagagaagtgaactatgtgttgggaggaatttaagacatgtttctggcttccatgttgaagagaatttctgaggttctggagctgcaatttgcgtggctcttgcatgtcatggttttctcttagattattctttttcccttcaaaatgtacgacagttttgactattagctaaatgaagaaaaatcaattcattattgtttcgtttaatgtggctcagttgtgaaaatgctgtttataaatcgtagctgttatgaaaattttcttagtacaatgtgacttgaaataggttagttaatagttctaagatgccaatgaagatgctcttacttttaagggtagaatttcaatacatctatcgacatttagggcgttttgttcctgtttggcattttttaaatcaagtcttgtttaggttgctgttagatgtaatttcaatgtgttttttcctttcttactaagttaaagtacgttgtaatttgtgctatcaaattttcaatggaaatgcaaacatagcttaaattggtgaagtgttaatttttatcatgttctcccgtagctcaatttgaaaagcaagtcttgaggaatttctgttgtggatgatatatcataagtatacaactgtttcaaaatagaatttcacaagccatgcattttgaattactgtctcggcttagagatgggacagaaatcaatgctcgtttgaaggaagggtctccaaatgtgggctggttatgtctttctaaatattccaagggtgtttgatcaatgattgtttttttactcttcactaattcctttggtgaggagtatttaaaataaacaattacttaagagcagagtaaaaaaaaacatcagaatttaaaaaaacaattacttaagaatattaatgagcatttttagaacattagttaacaaatcaaaggtaaaaagtttgaataatacacctaactactcattattagattgtgttaacttacctctagtagtatacacaaaatttgtttatttatttataaaaatcaaacttaggtatgagaagatttataataaatcacatatattttacaattaattgagttatattttcttgatttttaataacatagagataatttcaattatctacaccaacacaatcttaagataataatgtcttttataatcataacactttaatgactattgaagaatttgcagagagaatctaatacaatgtcttttgtgcaaaacataaaacgattagttttaataaaagtgtctgaaagtttgactttggaaaaacttttttggatagtattgtaaatatctatattattttagtctaaaactagtttttttacaaatttattctttgccaaataatattttaaagaagcacatcattataaaactattatgatattaataagttgtttaattttaaaattgtaactaaaactaccatgattactatcgaacacatatatcaattggcatgtaattgttcaactttattagtgagaaaactttgttattcatagtaataacatgattgtttccaatagagaatatttataagttaaaaagataaaataagttaaatctcaactaatttaactaactaaaataaggtatattatttgagctgacttttatatgtaacgtaggagccatgttgaagctgaagtagtagattttgttaaatttatttttatttatttattaaagttatcttacccttttattcattttcaggttgagttaggcatataaatcacatgtaagttatgtaaaatgaaaggttatgcagattgacattttttaatcatgttgtgttaagttttggacaaaactctaccaaaagtgaaataaatttctaccaaaatatttgggcaagtaaaccttttagttcatctttcaaaacaattattgagttaacttgcaaacctattattcatcttttaaaacaattattaagtgggttttccacttgtcatactgatttgctttaaataagtcagactaagcatttaataaacctatttttcaaaaaaggattaacttgctttgtcttgttactgtaccaaacatcatctatagataaaatgtaccaaataaattttataactaattttctacactcatttgcttattaaaagagtagttattctttaatagttcatattacaaatcatataaaacctttcttttcaaacaattgttctctaaagaaagacttgatccgctgataatatagcattttctactaactactgccacatgtagttggtcagaaagaatcacccgggagaatgaaaatatttcgatctttcctttcaactagagaactaattttcgaaattatattgtattatccatatagtctatagaggattgatgcttgaacagtgacactaatcagtaatcaacaagtcttattttgattgtaattcttcaccttcctgatttgcctgttaattttttcccttaatttgttctcgtatattatatggaatggccatgttcacaatgtgagttaaataggatgatacaatggtgaaagacttgaattaatttgagattcattgatagaaatgtgactctttgttcatcagtactttataaagttgcattacttctgaattgatgaaaagggtctaagtaaaagagtaaatccaagataattaaaagctgaaatgtagacgaacaacttttcagttttcatctcttctacaataaaaattggcagcgcccaaacaacatgaagaagatgaactcatcgattatcttttttgcatcagtcttctaccgtacgatactatcttagagagatattctcgtgaacattttgacacgtacgatacgatcaagtacttgaacactaaggaagactcatgtcacaagataaatactactaaacactccaaacaccaataaatcgtgttatatatatatatatatatatatatatatatatatatatacaggggcggatccagaaaattaaggaagggtgggcactcttccaaggacaccgtaaccgtgatggaggcaggccaacgatgatgtcggagaagcaattatttaagggtggacaccatttcaaaaactcaaaagttcatttcgaaaaatgtaatatgaaactgcataagaaaaaagtgggtgtataaagaaaaaaaaattgggtgcaaaaagcaaattaggcccaaatgacattaacctagcctctttctccttccttttggtttgccgttttgctttctgctgttcaactattttcttcttctcttctcactgcacaagctcctggtcctccatcactgcctccacccctactcacacagctagaatcaagggtgggcacttgccccccttctcttcaacttggatccgcccatgtatatatatatatatatcctctccaagtgtgtgaaatattgtaccattagttatcaagtaattaaactgatccgttccctggtctagctaatcagcaacgaaagttatatcataataaaaatattatttatatatattatactatatgatatatataatatataatggggaagggacatgaacttgttggtatgcatgtcacatctaccattcaaccctataacgtaggttgggtggcatcattctattgccacttgcatcttgatcaccactgaccgcactttgagcaatgaaactctctctataaccattgatccctccaatctcagagaagctctttggagcagccacttgaggccccacagaatagaagccaccaccattgaaagtgttgaagtctgcagctttgttggttgctgccacagaatgatgcaacttgttgatttcaaccatcaccccatcaatattggtttgatgagttggagagtgttcttcttgttttgccgtagaagtcttttctccctcagtttccctgtagttgttgaggtagagcttcaagggtccaacatagttctcaaaacccagtgttgtcatggcccaaagaagatcatcaccattgattgtcttcctcttttccctctggcacttatctgaggcctcaccagtgatgaagcttatgaactcagacacacactcttgaactgtttccttggcctcctttgagattttggcattggctgggagtgcccttttcatgattcggctaacattggctatagggaggaacctatcttgttcttttgaggaggagctgtctgagatgttaccagatgttggacttcccacaggacttgttgtaatttggtttctcttccctgtcatgttaatggaatagaatagagtcactcactaattaagctaaacaattgagattctcaccttcaccctctctccctatgtgtgcaagtgtaagtgtgtacaagttatgcttagcttaggtgctgcatgcggcttttaataagggagcaaaagatggggggatataaaatggaaaagtggaaaggtgctttgatgtggaatattggaagaaagcaaagggtgattgatgaagaagatcacaaagggtggtttttatatcgactaggaagacccccttggtcatataaaaaaaaatgaaaacaagaaagtaaacaaatagtagttttatagttttattcaatgaccatgtataactttcaaatttaaatcaaatactaagataacaccttgtcagaagtgttattaattggaccagttttttttatgtattgaaaaaaatgaacaaatagatagggtcggcaatgttgattaaataaatatcattctggaatcttgtgtctaattggtcatgtgacagattattatatagattaatgaaaatttttgagggccagaagagaagagacaggaaggttcaaagtttaatatggaacttattcatgagtataatgcagtggattaagttcaaagttgtggcattggtgtttggcaaaatatttcgtatatatcccatctttaatgaggtacttgggaaaaagagaaaatgctttccagatagatcaagaactaattaactaaatatcaaagcctgtcattgtttgaaaattgcaaggtaaatgatgagagaaatgattatggaaaattgtttgctagaagacaccgcacttcacaaattggtgttggcttttaattagtttggaattcttaatcagaccccataacgtgaattattcgtactagtgcatatgttatttttgtacggctttttaaaaaagggactcgaaaagatgaagcaatgggatatatgctttcactttggcacgcttttgtgttgctttgtctcactgagattcttccatcacatacatattattgcaggacagtatcatctcaaggcatctcagccctcagtccccaattttcttattttccacctgactacttcttgaaacaatgcaattaatgtggaaataaaaaagagaaaaaatattgcatagacaaaaaaaaagaccctttagcttttgcatttcccgttaacgaatatgtcttaaactggcttggttctttgatcagttccaacctgtcaagtctcacctgcatggttctgagaaaaaaatatcagaaactcacagattaaagctatcaaacaggcttctgacacatggaagctaaatccaacaagcacgtactaaatatatatatatatatatatatatatatatatatatatatatatatatattggaccggctcttacgtattgtcttggatattaatttgttgttaagagaggtagctacaagctgcacatacaaaattcaattattggatgggtttgtttttgttatataaaagtttaggttaattgaatttttgagggtcactgggacatttaagataggcttcaagacctaagagggtacgtttatatagaagtaattatagattaattacgagcacattctttactttaataacgaaattcaaacttagtctttataaattatgagttctattcttatcaattaaaccaattattggatggatgggacatgaaaaatgattatgtgcattatactatcacaataatgtctattttagtttgacaagaagttggaaattttttaagtcaaacttagaattatattaacaacgtacgatgatacgtgatcaaacgcataaaatataatacacacataaaaagagcaaatttgtcaggatctgaactattaaatgcgaaaattcaatttaaaaatgacataaaagtaacaattacggtctctaatgaaccatgctagctaattggggtctgtgtccaattgaagttgattaacaaaaacgtttcatgcaacccttttgttcctgtttatagttacaattgcatgctagtgttttaaagctaggggcaattttcagcaatatttcatttttagattctattctagctgttcaccaatcatcgatttctggtttcttattctttggcttcaaatatctgctgttcatttttcttttggtaaacttgtatgctagctgtacttctatttcgatccttttcttcactaagaacaagtaaagttgtctagatagtgctctgcatcatccagccaataggcacttattttaattggaaaatactcatgcatgtaggtaagttaaaatgacaattccaaaatctttgcctatttttagatacaagattgagatgtttatggcattcttgttgagaacctaatatgtagtacaagtagtggtcaattgtgtacattataagcttagttttattctgttctgtaaagtttgaaaatatttgtttgcatttgttgatagctaaatacgtgaagtgagattacatcatgattgattaaatattcgtattatgtgtgtgaatagtctttggttgtgcttatgctggtagctttgaggattattgacaactgaataaaacaatttgaagatattaccccaatggatatattttagttataatatataaattatgatataccatttgcaaatctgtttgtcaacttgccggctttcagagactgctagaaagtcagataacatcacaatcagaactcagaaatatgttgaagggagaattaggggaggatgattctaaaggtaatatttatttatgagagagctcacaactgcagcaggccattcataatagtgataagattctcttcatctatatacacacactctgatgcaatagtttttatttaaaaattaaagattcgaatatggtagaatatattacgaaaaatataattattttttgtttaaaattgcttatattttatttttttatttttttaaagtagctgacatatatattggtttaccatttccatcgtcatggtattattattgttggtttttaacttcttcataaatttatgaaaaacaataatcaaatttaaataaaaatattatattcaaattaagataataactcctttatttattatgatatgaataagttatatacgcacacatatataagataatagtatactgttatgagatcaaactactccttgctttagtttcttttattttcacagtgaacgttacacctaaattatatttggtagtataggtagcacgagcctttcattctaaacgggtctcaactctcaacaaggaaattatcttgctttggtcctaatgtagtcactgtttgtacaaacgcatgctggataatgccatccagatgttaacataaacaaatccttgcagtttgagaagatttaaataggattttggagccaatatttcatcgtgttgttagaaatgaaggattttgaaatgaaaacgattagttgaaatttaggtcaatactgaacatatatgtgagctgtgacgtgagatcaatttgttagaacgggaccaattattggaattataaaatacgtcaattgtcattaattaaatcaattttgtggtctctctctctctaaagaaaaattcaattttgagatcaatcagatatgacttgacgatttttgtgtgatttgcactcaataaaaaaaatgttcttttaagaagcccaattttttattttatttttatgaataaaacgaaatcggaaaaatgttatgtgaattttaactctagacaccctcttagcaccctcatttaggggtgttcgcggtctggattggatcggttttgaagcaaaaaatcatccgatccaattctttaggtttggtcatttgatcatccattcggtttgaaatttttttcaaatccgatccaatccaatccaatttttttcggtttggattggatcggttttcggtttttttaaaagtatacaaataaaacttatggaacttatttttatcaaaataaggagtatctaacataaacaaacacattcattggacaaaaacaaatattattttttaattttcattagacaaacacgttcattggacaaaataaggagcaatgtattgaatttttgatttttgggttatgatagggaataggcccaagtagataaagggtaaggtatggtttacaattggatcggtttggattggatcggttttcaccggccaatccgaaaaccgatccaatccggtgaaaattttcggttttttttcggttttcagtttttcggttttcggttatttcggttttcggtttttcggttcagtcaccgcggtttgaatcggtttggatcggttgatgaacacccctaccctcatttaacttttatatggatgtctgtaacttaactttgtgcaaaatttgcaaaataaaaaactgtatatatgatgtattgtaaatatcatgacctagccaatcaacctacagtatcataagtaatgcattaggattgtctaaaaccacttaaaaacaagccttcaaaaccagggaataatgaatacttttccaaacatatcccattttcaagcatcaagcagaataaaagttattggataggtacaaactagtaacacaagtcacaactcacaactcactcaaccattttcacaaatacttggtagccgtatttgaaaatttatcattatcactccaatggggtcaatccatgatataactcccataaaaaaaaaaaatacatcactaacccataaaagaaaactatctgaatggtttaaaacataaaagcgacagtgaatagcttcacaggaaataagaaaattcacgtcaaaaacacatatccaaacactgtaaattatctcaattcaatccagtgttttatattcttttaaaaaatataaccttttaaaatattatattttaataataaaatttatttttctaataaatagtatttttcaaaataaaataaaatatttatttaatcatatatagatttaattttataatttagatatgtattatatatggtattaaaactcaaatattatgacaataaactaggttaattctgtattatttaattttgataaaatcaaattccagttaaaataaatgaacctgatggaatggttcattattgaaaaacaatttgaatccaattgaatggttgatataattaaattaataaatgaatattctctcttatttttaaaatttattagactgtctaattaatagttcatgaatcatgttactagtacttttacaactctgtcgtctttaaatgcaaattctatataaaatatttatagtagacaaatgagtggtcattgacgacggttgagaattttattttcataataatattaattaatattcatttaattgcctttatttatgagtatatttggcaattgaaaagtaattgtttttattgtgttttaaaaaacaatggcttatattgtttatataaataacaagttttatataagaactctcacgttaattatttcaatcataaagtcatataagaatgaaattttaaatttaagcactcaatagccaataggtgctgctatagaagagagagagagagagagaggagagaagaaaggaaggagcagagaatattttacaaaataatataatgatttaattttttaaacaaaactataaataaaatgaatatgtcttgataaaaatattaacaaaattatgatttgataagattatgtgaatccagagaggcagtagaagagcatggaatgcaagtaccacgtaagcataaagcgtccaaatatcttccacgcaagccaaagtcctttgcggctaaacgcaactcgcgaaaatccccaccaatcaaaatctcccataaccttcagggctcatctttttcttgccacgtgtcctccttatcaccacccccttcccactcctttttctttttattatttttcatttttcaacttcacttcaactcttgctctgtcttcaatcaacacaacacttcttccattctctgctcacgcgcaatgaaatctagcctttgactttcatcctcacacactcatcaatcaatggcttcctcttcttctctactcttacttgagctcaaatttcttgcgccgcaaattacccccaaacgacgccgttctctctctagattttgctctctcaactccagctacaatgtttctctccgtacgcgaatccgcgccgtcaaggaagaaggtgccgtcattgacacagtgaacgacgtgaaatggagcggaaacggagttgccgcgagcgaatacggtgctaacggctccgttaacggttacttgaacggcgtctcgggcgttagtcagagtgagaacgcgaatggaagcttggtgaagtacgtcaatgacaatggcaatggcaatggtgtagcggcggaagtggtggaagatgctgcagaagcgtcaaagcggatggaagatggaagaaagaagaggttggaggagattggtaaagaggaggcctggttcaaaaagcaaactggggaagcaccaattgaggtatgaatatgagtgtatttgtttgtacaatgttaattaggagtgaggtgatcttcaggtcagtgtgtatatagaataacatctgtgaagagaggtttgttccttaaatgaatcttagtacgtactccaaagggattagtctttggctctcgatttgaggatactctgggttcacataaaatgttgattagtgtgactgtgttattagattgaatgagtgagaagaacttgtgattttctttttgcaggtggcggttgcacctggaggtcgctggagcaggttcaagacttactcgatgatccagaggacgtttgagatttggggatttgttataacgtttatcttcaagtcttggctgaataatcgcaagttctcgtataaaggtttgttgttttgcttggcatggtgcgaatgaggtgttcatgaatctgctgaagtgacccttagaatacttattatgggacttgggaggcacttgagctccattatatgtttattttatggatttgataagcaaatgcagaatgtattcaatgtgttttctatcagtagtggatgctggaatcggtaatgctaatactcacacaattaagcatttttccctgcatgttagaattctaatattatattttaatgggcgagcatttgagtaattgcaatcatagagcatcaacaagcacttttaacatatggtagagaagtttacttttagctgtgggggaaatggaaactaagagcaatcgtttaaatagggagtatgtcagccctgtgtactttactattttctttttcaccatttggttctgctatcatggaagactgtagctttttttttggtatttttgtgtatttattcttcctgattgccacttgttacttatatgttatagtcataatttaattatttagatgtttttctttagctttagaatcctgcatggtcactatatgcctttagagtttggaactaatttgttgcttattatgcatatgaacttgaactataaaagtttataaagtatggcaggttggttatgctagccagagttgattcttgtgatgctatcaatgcccaagtgctgcatgcttgacctcaagagttaatctcattgttacgaatttgtcatatttatcaattttgcctgtttggaaatcatttcctgacaacaacaaataaacctgttaacacaaaaattgtgaagtgctttttaatttttattgaatttttaggaatttcaacaatgtgaccatttgttttttattgactcaaagatattatttacaggaggaatgacagaggaaaagaaaacctcaaggcgaaaggcccttgccaagtggctgaaggagagcattctgagattaggtcctacatttatcaaagttggtcagcaattctccacaagagtggacattcttccacaagaatatgttgaccagttgtctgaacttcaggttgaattggagttttgggttgaacttataagattatttccttgcttgttgtgcttatgttatatttcctttttttatctactttttttgtttatggcatttataatttcacttggagtttagaaagctgatgacaataattttgagatcacaacacacacacattcacaaaagaaagaggttaaattgagaagtttaaaacatattaaggtttcatttcttcaaagccttagttaccttaatttttgggttcaggatcaagttcctccatttccctcagagactgctatagctattgtcgaagaagaacttggaagtcctttagctggtgtctttgatcattttgagtatgaaccaatagctgctgcaagtcttggtaattaatgttttactttatgcatatttgtaacagtaaatgttcaatcagagaagggaacccaattcaatgtactttggctttaggtttaatatttgattagaaaaaaggaacggtgaacatctttttccccaatgcaggtcaggttcatcgtgcaagattaaggggacaggacgttgttgttaaagtgcaaaggcctggtctcaaagctctttttgacgtcgatcttaaaaacctgagggtcagtgttataagcatttcatataatgcttgcccttctagtgtggtgtgcaaatgtgatataactctttgataattctatcacttgctccttaacttatcttaattttagtaaccttccaagattgacaagtcgtttttaaaaattgatctgtgtttattttttttttccttgcatgaaggattttaataataggacttcctgcctatgaagacttacagaattgacaaaacactaattcttgggccttttttcctcctccaggttatcgctgaatatcttcaaaaaattgatcccaaatcagatggtgctaagagggactgggttgctatttatgatgagtgtgcctctgttttatatcaggtgatgattttctggaatcttgttgcacttttaggttacttgagattaacagcagaaaattatttatgtggttctccatcataaagatgtcattctgctgtagtgaattcaaatataaagattgcataggatgatcacaattcatttttagtttgtcaagaagctggctttgctctttgaaattccatatggggaaaccaatgaagtttcatttggtcatggaagatttcataacaacattttagttaagatttcttaaggttgattaggagtctcttattttaaacagaaaggagataattgaaagtggttagttttgacagaaggaataaggtggcagacaattttacctggctaggtgatggagtaaaatggcaaatagggatttttggtttataggtgtaattataaataatgcttcagtaacagcaagagtcatgtttgttgagaatttcatgtcataagtttttttctaaaaccttgaacaacattattgcatttcaagtattagagcttagccaatgtataaagggagtcttaagcaaatttgcaggtttggaggagttgatttgtggatattgttcttgtttcagtatgatgttttcatgtgttttctgcacatcctcaactttatctaatcctgttgatgtaacatgaattaacaattttcaggagattgattacaccaaggaagctgctaatgcagaactatttgcaagtaactttaaaaacttggattatgtgaaagtccctacaatcatctgggattataccacgccacaggtttagctttcagttctcatagataatatatagaagttatgcatctttcccatttttacttctgatatctttcgtatttatctgcaatttaactatttttccaatgcagattctgacaatggagtatgttcctgggattaaaataaataaaatacaagctttagatcaactgggtcttgaccgcaaaatgttagtgtcatctgaatttcttcaagcaaaactaatattggcattttacatcatacttatgtgcatatcaacaactggtgatggcatctaaaattcaaattaatataatgtctactttatcttctacaggttagggcgatatgcagttgagtcttacttggagcagattttatcacatggtttcttccatgctgaccctgtgcgttcttgttcttagaattgctgagtggtttttgagttgtctctcgtcttatgtttgtttgagttttctctgtatttcacttctaatccaaacagagcattagtgattcttttggattgtctagtaactgttaaattgtatggtgtagccaacctgttatgttcactatctctgaatttgctcttacactgcaacattcaagcatctgttacctgaggtacaagaaacaatgctgcttgtgccatatagattatcatctgtcgctttgggaagcttccctagggcttattcaaaaaagggcattagattagaagtaacttccttaccatgataaggaatagtgattgccaagcatccaaaacactatgttaggaactcattaaaatattgcctggcatgtcttttttcctttctctggggaagaaattgtgttaaatgaggaataatgaattttcaatttttcatattttatgattatccttcaagaggtttgatttgatgcttcttgtaactaatatttacactgttcgtgcagcatcctggaaatattgcagttgatgatgtcaatggtggaagattgatcttttatgattttggaatgatgggaaggtatgttctttatcttttctgtatatttagaatatgaaattacaagtcaaacattttactcttggtgtgactaatacatttgctaattgttgttatgattggtgttgcaccttacagtatcagtcaaaatatccgagaaggtttacttgaagctttttatggaatttatgagaagaatccagataaggtaaagtgtaactgttttttatggaagttttccattaggccatggaaaatctagcatgatattccattcttgattttaaattacttaccaaatgaagcttgcgtactgatgtaggtccttcaatcaatgattcaaatgggtgttcttgtcccaactggagatatgactgctgttaaacgaacagcacagttcttcctcgacaggtagtttattaaatccatttagtaggaatgcataaaaaatcataacacctacatagatttagcagtagtatttctataaatcaatatcattagcagtagcttgttaattattgattgcaataactgcagaggctgcttaaaactattcaaagaagtgttgcgaataggaaattctaagcctttttatcttggaaaaggaaaattttgttgattgattgggtttttgcttttgagtacatggctgttctaattagttatgtcaagaatatagtgatattagggttatcttaagtggtaaggatcaaactacattaactcaaagagtgaagggtctcaactttttttcctaccaaaagaaaaaggaataatgatatttatttgaaaattgttactgaaattttttgactacttgctgattgatgagattttgcaaaaaggtggagagattgatgaggatgtaaatcatagaatcagaacagggtagatgaaatggtggagtgcatctgggttgtgtgacttcaaaatttcccttaagctaaaagaaaaattttataaaacaactgtaagacctgcaatgttatatggagctgaatgttgaccagcacataggcaacatgaacataaaataggggtagcagaaatgaggatgttaaggtggatgtgtggttatacgaagatgaatgaggaaacatagattgaggtggtttgggcacggtagtgagacggcccctgaatgctcccgtaaaaacaaaagtttgttatcgagagttcgacacaaaaaaaggtagaggtagactgaaacttacctggggaaaagtagttaaacaaaacttaatagagtgagatatagattggcgaataatgtggtttaggatggaaataagaaaaactataaacttggtggagggtcagacctgttgttatctctgtattccagatgattcatttttagtcattttcctcttcatcttccccctccttctccccccccccccccccccctcttattttcatcctcattgtatatatcattggattcatctaccactaatccttattagcttggtttaaagttgatgttgttgatattatatgcttatattttcttccctctattttatggtttagagttacatgtctgtactgattagttgtgctagcaacttactgcaatctctgaccttgagctcttcaacttcaattttttatagttttgaagagcgtttggctgcacaaaggagagagagagagatggcaacagctgaacttggattcaaacaaccattaagcaaagaggaaaaagtaatgaagaagaaagaacgtctggctgctattggtaatgcacctggtctagtgtgtgtctttaagtttagattatttggattatgcatacaaggattattgttcatgaaatgagtgaagacaaaattagacaagttataaggaaggatatattgtttgggctattggctatgggttgttaacttattattttatccagtagcactcaagtaggtcaggtgaaaagctatacacagttctatatactaacgttttaaaattggttttcctgattggttaaagtgattttttcatctgtaaagtttaacatgacctgtgtaaactataagaatttttttttctgtgtgttgttttagtgcagtgcaagtttggttggatggaatggatcattcctattcccatgcttggttaagtcattggaatgggaatggacattcgtgtacaattatgggaatatgtattccattacagaagtgatagaatccatttccattttccaacatgttttaaaattgacccatctcacctggcttacccattcaagagcaaaatccttttgggccaatatgtttgttatagacaaaaaaaaaaagaaatagcttgagttgacatgggccctgctcatcctgataatttggttggctcacattgggcctgcctaagtctatttttcttgtatctacttaaatcattcatagcatatgaaacaaaaaatggaatgaagtcataattttatttattttcatagcaaaatgaaacataggaataagcattccattaccatacccatttcatcattccatcaaactaaacatgatttagttcaataacattttgcaatccataggcttatcacttatttgtagctctcatactttaaacaggtgaggatttattagccattgcagcagaccagccctttcggtttcctgctacattcacatttgttgttagggccttctcaggtgattattaagagtttaatgtgttactcttgcacattctatgcttgcgactgcaaggtaacaagtcaacattgtttttgcagtgttggatggcattggaaagggccttgatcctcgttttgatattactgagattgccaaaccgtgagtatcgtattcatactttataattttttaataccttttagacattaaaagtttaaaattatatgctttgcatatctaatatgactatttttcctggtcctttagctatgctctggagttgctaaaattccgtgaggcaggagttgaagttatcctaaaggcagtcactaacttgttcttgcatgtttgaattcagtctaagtcctatgatttcctttcttatatctttcttctaaatgtacaggacttcagaaagagatgggacagacaatctcaagcattttacaatttatttagacaggctgatagggttgaaaagcttgctgaaatcatccaaagattggtacgcattagatttttgttgatacaattttagttgttcgtttgatttgtatcttttgttctggatttctgttattctagatcacatcttcccacccttcattcttgcacaggagcaaggtgatctaaagctccgagtccgaactttggaatctgagagagcattccagcgtattgccactgtccagaagacaataggaaatgtgagtgaatctggcatctaacttagtgaaattataagtttagttgtttcttggtataaatggtttgagagattgagtccatttaatagcctgttgtcatttttagtatctatgcttgcccttctaatttaatatctagcatctattgtaagtaactgttggctattgtgtgaacacacttgcaatagcatcaactcattaaatatggaaatgaaaatggatacctactcctgttctgacaatataaaactacattgaataagcttacctgccttcaaatatttgtaactctcttttgataagtttaaaaaaattgggatatttgtgagtgccttgcatgcaggagtattttcatgtgtcgggaaagcatgaatcatgattttcaaattacataaaaaaaccctaatattcttaattttttccacgagatttttaagtgaataatggatgtacatagtaaattggctctggacagttgacagaaatatatttcattcacatacttattataaaccacttgcatgattttttagaatcaatacttcggatatatgtaggatgtgtgtatatgaccaaagataaaaaaagttggtaggatgatgcatatttatgttgcttttttaataggcaatagctgctgggagcctaataaatcttgcaacaattctgtatcttaactcaattagggtaagctgttccgatctcacttatttttcttgtgttgattttcaattcaattaattgatggtccagttgtagtggtactttttcattcccaagtttcatgcgacctttttcaggtgcctgccactatggcatacgtcttctgtgcaatatttggttttcaagtgctctttggcattgtgaagatcaaaaagctagatgaacgggaaaggttgattacagggactgcataagcaactactaggtaattttcttttctttttaaaaattttggaattggatgtcacatgttcatgttataatatgcaaaatgtgaattgtgtaatcaaaaagattattttgcaagtttttgacattgcattttttcttcattatggtgtttttgttttttccttgtgacctggtggctatgggttctagttttgcaaatatcctctcattcttacgggtaaggttgtgtacatcttgctcattcttcccaaagagaaagatggaagaggctgatgtaatgggctgtcctttttatggtctttgtttcttcttccctgctcacagtggttaaggctgcatacagttgagcctcatcagatcagacccctcaatggtcgtgaaccttgtgaattggatgcttatatataatttggtcttaacttgaaatttgatttatggcgagtttaaacatgcaacttgaaattttagatgtgagaaaatgttacttgatgacatcacccaggtaataagcatactgtattctgacggtggctaatcaacttgttcatttcaccttttggaaacagagttaactattcatgttagtttttttatagtacatatgaccataactattcattggtatttgaacaatgaaaaagaataaactggtaacgtgcttttaactgttctcattctttgatttctttctgagattttagtgtcatgactcatgataaccttgagacataatccttctaactgaagacaaattctctttgtttcccacattggttaagcatggtttaagtgaggacactataggtggaatgacccttatgctctttgttttaaggttttaagtcaagatgtggtgtctagccttctattgtgctctttcacttaaccccattaattcagatctctctcctttggggctcaccctagctgctcaaaagtagtattagagttgattttgtttggcagaggatttgcaatgagttcagtctcaatccagttgtagatggaacatttaagaaaacttaactcatggttggtatcccccctcttgagggggagcatactaatatttggatttacactttgaggggaagaatgttggaaattcaagtgagtgatgaagccctatattggttaagaatgggttaaactgacgaagacaaattccaagtgaaaagattcatgtagtgtcccactattgcaacctattgcttgatccgttaatggagatctacttaccttttggctcaacaagttgttatttaagtggttgcaggatgttagtgagtaactgacaaatgcaaattctgatggttacctcttaactcttaatttctagtcaaagtatattaatgtgggtctgcattctagtgtctgtatcattattagtagggattttgattggttggctctcttcaccttaatatgtaagatacccaggtatctcaaatgtagggaaattcaattttcaaaaaccttacttcgtggtatgataaataaaaataattgtgtgaaaacttagatttctttacatcatatgttctcatgtaatatgatgtttgcataccaaatctgagcttctggggttactcagaaatctcacataagcatgagctaaattgagatacaattctgcttagctgtaaatgggttgatatgttttgtagttcttattgaaacactgttttgggtccttgacatgctccatgtacttatatctttcgtttgattttggcccattgcagatttaggatggacatgttgctcatgttaaggtcatggttacaagtcaaccttcggggcatcaaaattattaggagctcaaagtaagagctaacatcttggaatatatcagcaggtgctaaatctttataatggcaagcatgctggaggcttctgttctcatttacttccctaaagattgagctaaggtagccaattggcgagccacatttttgtcattaacacgatcccccatgcgttttcattgcaaaattttattatcaaattacatgtattagtgttttattttttttacctcatccatattgtaaatttaataggcattggtgtagattgtagcgtttattgttgtaatcaccatatggtatggttcagcttccaatatagtttgacaacgggaagctttgcttgtaactgacgtacataaatttatacaatgaaaatgcaaatataagtattttctataaatatgttggatgtcaattgcccatgaaaatacagtttttcgtggttattgtttcttgtcctgagcatctatcttaaggttcgctgttgtgcacgagcatgatacagcttattttgacttcaagtagcctgtttaatggcttcaagcttcaaaattatctctccagccaccaaatttttactgttagctagtattggtttcgtaacgaagtcgaatgataagtgtgatccatgtaactgatcttacatagtaggataagcttttgttattgttttattattattggtttcctggtttgtattctagagtgtatatgtgtgtgtgtattggtttaggccttacctttcgtatctacatttccccattccccaatttgttaaatgtattctcacccttttatagtatgatgcaccaagaataataatgattgaagacatgtttcatggaaaggatatagaaagttccatatgatagtagatcgtagcttactggacatcttttttatgacatccacatgggcatcttccgggtagcttcataacaattaactttagactatgaaatttgcattatggactttgtttttaaatagttactatagtttaaagtttgttatgttttctattttcaaataattattgtttgaagttttacataagaatattgaaagtcattaaatatgttcaatcttagaaaaaaaatattacatttgaatagatcatcttttaactttatcatttttttatattatactctgtcaaaacaataaaggataagaattttaaaaaaattagttaatgtgttcttaattcttttttaagtaataaataattaaaaagaaaaaaaaacttctaaaggaacaattattttgaaactcacagaaatgatatagttgtgaaaacaatcccaactatcaaatttaagttctcaaaagccagtggtttgattgagagagaagaggtgggtgaacggtgtgatttacgtaacttagatctatgcgggttcatctaaaaagctcacaagcattccacgctatctttcacgcgaattggttcaaacattatacgaaatagcattgctctcaaattatggataactcactttttatcatcatataaatctcatgtgagtcatacactcgtactcataaaatttatttaataatgaactatgttgcaagcatgtctcgctatttgatgagccaacccaattgagaaaacagatttagctttataaatcaaataacactcaactgcaagaagtgtgaaacagtcaaagaaacaacttcataacaagatttcttccatcattaatgttgtgatcatggggacgagcagttatcaactaatgttataaaacagtaaacaataaataaaagttatagatcctttacaatcgccattcgccaatgtgctagctttagatttagaaaagctgtaatgaattcaacaacgttaaccatgacaagcaacgaacaaaactacaacatcatctaaggcaaggagttggtatagacatagtcttcattctcgaaaacactttgttgtgactcaccactttcttccttgcattcactgaccctttgcttttcacagccacctgtctgcatgattaaattaatctagttactccaaaaaataaaaactttgatcgttaaccctatttacagctctatttcaccattatttgttagacaatttcatattgtatttattttactcccataattagattaaatcaaccaataacaaaaatatcaagaggtagatgtagatgagaaattcaaactcacaatagtagcagaagtcccagaagccacaacttcgctgattgcttccccttgaaaaacacatatcacattgaagctaaacatcagaaatagaaacaaagcaggcatcaataatctcattgaatatttgtaatattattggacctatctagcctatcataaagctgcatagactatataatatatgtgtgatatactgatatggcaaagtagaaaggactaactatagcttagtgtcctttatataataaagaattgaggttttcgaaaattcacgcgacaacattgacgcgatattggtagttgataatatttattgatatctatgtattttcaatcaagggggtttcagcattctcctttgacctgtccccggattcctcggcaagaaagctcgatcctcaagaactaggttggatcatcttggtgttttctcacatgaaaattatatatatatatatatatatatatatatatatatatatatatatataaaaagccagccaacagagatcccatgtaatagtaaagatttgccacgttcttgaacccaaactcaccctgacaccacctacctaccctcctccgtttccaaagggtacaataaaatttgacgtatttcaaaagttcaagtctcacttgaaattaactttttaaatctttacaagttatcttgtgtttggattttggagtttgtgagaagattgaactcatttacatgagattgcgtcatggaaatccatttttgctccccttgtaacttggaagatatgcgagtttaatccttaatgttattgcaattggtatgtggtttttgttgttgttgttggccgtgatacaacaacaatcttaaggatttaaatagctgataatgctcatgtctagatttctgcttgtagtctaaacttttgtgtatgtcttcaacaaaaagtgtttaaaagttacgttagactcaaacttgtggataaggttaaaataaggaaaaacatcacaattttaattaaaaattattatttaatgatatttcactgtagatatatattattttttgaaagaaaaaaaaaaactaaaaaaaatgtgagttaacaaacaagggtggctatacataccattgttcggggaaacaagcgttcagcacacattgcaacagcaatgagaaatggtaacccattattctggtgtgactccatgcatcaaccgtttctcaaatttatggacatggaactccaacatcagacaccttgtcaatcagggccatgcccaaaacgcccttgttctcttccgccagatgaagcaaagtggcgtcacacccaacaactcaacctttcccttcgtcttaaaagcatgtgccaaactttccaaccgcaggaactcccaaatcatccatgcccacgtcctcaaatcctgctttcagtccaacattttcgtgcaaaccgccatggttgacatgtatgtcaaatgtgatcacttggaggatgcacacaacgtgtttgttgaaatgcccgtgagggacattgcttcttggaatgcaatgctgttgggattcgctcagtcttgcttccttgataggctgtcctgtcttctacgtcacatgaggctttctggaattcgtccggatacagtcactgtcttgctactcgttgatgcggttttgtgtgtgaaaagtgtgacatttttgggtgcggttcattcctttgggattcggattggtgtacatatggatgtttctgtggctaacactttgattgctgcatattccaagtgtggtgacttgtgctcggcagagactgtgtttgatgaaattgactctggtcttaggtctgttgtgtcctggaattccatgattgctgcatatgcgaatttcgaaaagcatgtcaaggctgttaattcttacaaagggatgctagatggtagcttttccccagacattagcacaatactcaatttgctttcatcgtgtgtgcaacctaaggcactatttaatggtttgctagtacattctcatggagtcaagttaggttgtgattctgatgtatgtgtggtgaatactctcatttgtatgtattcaaagtgcgaggatgttcattctgcaagatttttgtttgatggcatatctgacaagacttgtgtttcatggactgtaatgattagtgcatacgctgagaaaggatatatgagtgaggcagtggccttgtttaatgcaatggaagctgcttgtgagaaaccagatttggttactgtgcttgctttgatttcaggttgtggccagacgggggcacttgaacttggaaaatggattgacaattactctattaacaatgggttgaaagataatgttgtagtgtgtaacgcactaattgacatgtatgccaagtgtggaagttttaatgatgctaaagagcttttctactccatggctaacaaaactgtcgtctcctggacaaccatgattactgcttgtgctttgaatggagatgttaaagatgctctgaacttattttttatgatgttagaaatgggaacaaaaccaaaccacataacatttcttgctgttctccaagcttgtgcacatggaggtttactagaaagaggattggagtgcttcaacatgatgacacaaaagtatggcataagccctggtatagaccattattcttgtatggttgatcttcttggtcgtaaaggacatctcagagaagctttagaaattattaaaagtatgccttttgaacctgatgctggaatttggagtgcattgctttctgcttgcaaaattcatggtaagatggagatgggcaattatgtgtctgaacagctatttgaattggagccccaagtggcagttccatacgtggagatggctaacatatatgcatcaggtgaaatgtgggacggagttgcagctattagaagaaagatgaaatatcttcaagtgaggaaatctcccgggcaaagtattattcaagtgaatggaaaacctactatatttacagttgaggatagggatcaccctgaaaccttgtacgtatatgatatgctagatggcttgacttcccattctaaaaaagtactactagcttattcagaggagaatgttgaatgtgaatgggagtgaagatataagaaagagactgtgattggagagctgtgttggtggattattaaattgtttcagaggatatatgcataaattttggtcctttgggtccactatgagatcaatcctcaatttgattttggattttgtcacacttaagagtttcttgtccctccttcaatgatgtattctgtagggattgaacccaagtcctttcccacaaactcagtgtatgttaccaactaagtaacattcattggataaatgacttataatacttaattgtaattgatattatttcaattatatattactagtaattaatgtgtgtttagataagctatagcaaactatgatgcatgttataaaaaaaaaaaactatgatgcccgttatatgaagcaactattaattacttttacatcaagagtgacgtaaattttagaaaaatgtggattagactagtagttccaaaacatgctataattgaaatatgctcaaatataattttagttcctataatatattcattttatgcttctagtctttacaacatttttttggtccgttttggtttctataaattttattttatgattttagtccttgacattatttgttgtctttataaacgataaaagctccttttatatttgaagtcatgccctttcaaatctatgttgcttccctcaaatctctctggccagaatttctctgccttattccaagcacttgggtctctcataatagcccatgcattcactatcacccttgactttttaggtatgaacaaatctccaaccatgcaatcttccctagattggtgtggtattagtaacggtaccactggatggatcctcgtgttttcctttacaaccatgtccaaatacaccaacttgtccaagtctgattcctccaccttcctcttcatacccaccacagtttccaactccatttgaactttcttcatcacccttggattctttaggaagctctcaaagcatccactcaattgctgtagcagaagtatccattgaacccacgagcatatcctgcatgcatgtgaggaaaaataaagtataaattaagaaagatgtactagtgagaacagtgacaactagttaagcacacagctttaaaaaggaaaaaagaaaaggttgagggaagaatacaaagctgtcattacctttaccagcagtatatggctttgatattgggccgttcaatacggtattcatattcctcgctaccaacaaagcccaacatgacatccacaaagtccttaactatattgacttctacctactctgatttaatatgctcatcaataattttgtcaaagaattcatcaaagattttgcgcactgccttcatacgcttgattagcccttgaaggtcaagttttccaatgtaagaaatgtaatcacctatgttaggagttgctgctaagtgcattacctcttgcatctcagctttgaagcccttctcatccaagtcctggtccatgtacttcttccctaagaccgttctaaatgccatgtctgcactgattgttgcaaccttggcgctgagatcaacagcagctccatcattgtatgcctctcttagaagcttgatggataggtcaagttcctcttccctcactgttctgaaggggttaattttggtttgactaagcaattccagtgtgcgcatcttccgcatgttgcgcccgtaagaaccatattcagcaaatcccaagttcttatgctcccaagcaatgtactttatagcttcatggggtggtctactagcaaagacaaggtcatgggtcttgaggaacagttcagctgcttgtggggaagaaacaataatggtgggcacaaaacctaagcgtaagtacatggcaggtccatatttttgggctagtcgatatgaatgacttttgcacaagaaagtacttttacttgaattttcacatgtttagttgaattttcacatgttgcaccccaaattattaggtggcatcgtaccgtcattgtccgactaatctctacaagtttcttggcagaggcctgatgaagatttttttgttttaaatgttgattgaagtggaacggttttggtagcttatgtagggtggtggattggttcggtaacttctttgatttgaccgtccacaattaaaaatatttccgcagagaaacaaaatttccaattttttgaaaaagacaaacttattttccatattatataatgattttgaacattaatgtttataacggagtaaaaattgaaaatcgtgttgctaaaggaagtagttctcccgatatttggtatgcatcaaataaataaattttgttttaaaataatatacatctcggtaatatatatatctttcttagttatattaactatagtattctcttttttttttttttttgtttacatgatatccctttccttattaagttgcgagaaaatgttgttgaataatgttactctaatttcaaatcgtcacgcaggacaatggacaaatctcctttacgtagtttggtcccaataataagggatttgatcataacatgtgcagaaaaatatctttcttacgaatggcgagacagtttcgcacaaacaacaaaaatcaatcaatccttagtagtgcaagtagccaatgcaaacgttcggaagaaaaaccaacaacacttgaaacaaaaacaaaagtaaaaattaatccgcgcaactcattgtcggccctcaatttgaatttcaaagcttttggcattaattaaaaaaaaaaaaacttttcattgaaagatagacatataataataattcttgatgtcaatcatgataaaaaattaagaaaagggaaagggtagtttattttcctgtgcatcttattcaaatagaccccaccaaacataacgaagaaacaatgttgcaaccaggtggttctttttatcctagccactttcatcctgaaggcgataacaagttggaacttggaatggcaagtaaatgattggccctaggcattgtgagtccaaactgctctctttcatgttcaagtcatctggcaaaatgtcatttggtagtttccaatcaaaacaatgcacaatctgtgccactgttagacaaaccatagttagacccaattgcaatcctggacaaccccttctgccagacccaaatatggtatcagctccaagtcacgccctctcacatctatgctgcttccttcaaatctctctggccagaacttctttgcatcatcccaagcacttgggtctctcataattgcccatgcattccctatcacccttgactttttaggtataaacaaatctccaaccatgcaatcttccgtggactggtgtggtatgagcaacggtgccacctgatggagcctcatgctttcctttacaaccatgttcaaatacaccaacttgtccaagtctgattcctccaccttcctcttcatacccgccacagtttctaattccatttggaatttcttcatcacccttggattctttaggagctctgaaagcgtccactcaattgctgtagctgatttgcaacataaatacataaatgtgccaaagaagagtgaacatatatatatcacaagttctaaaaatcagtagaaaatggccaacgagctagtagctatatttgtatcagtcaaaatcattaattaggacttttgggtaggaataggacatttgatccttcataatgctaccttttcttctctcctatggccatataattgtaagtatgtgacttttttaatttttaaaatatacaagaggaaaaatactaaacgatgtgataatgatttctcttaacagcaatatggctttgatattgggcagttcaatgcggtattcagattctttcagtacctaaaaagcccaacatgacatccacaaaatccttcactttattgacttctcccttgtctgattgaatatgctcatcaataattttatcaaagaattcatcaaagattgtgcgcagtgccttcatacgcctgattagcccttgaaggtcaagttttccaatgtaaggaaagtaatcacctatgttaggagctgctgctaagtgcatcacctcgtgcatcacggccttgaatcccttctgatccaagtcctggtccatgtacttcttccccaaaatcattctacaagccatgtctgcactgagtgttgcaactttggcactgagatcaacagcagctccaccattggctgccccttttagattcttgatcaataggtcaagttcctcttccctgatgggtctgaaggagttaattttggtgtggcttagcaactccagtgcacatcttgcgcatgttgcgctattaagaaccatattgaccaaaagccaagttcttctgctcccaagcaatgtactttgcagcttcatggggtggtctactagcaaagacaaggtcgtgggtcttgaggaacagttcagcagcttgtgctgaagaaacaactgtggctggcacaaatcctaagcgcaagtacatgacaggtccatatttctctgggctagttgatgcagatcacgataaggatttgaccctaacatgtgaaggtttcccaaaattgggaccaggtggtagtaatctctttccgttttcttgcttcttctccatagacagaagaggtaagtaagagaaactacaaaaattgctaccatccaaatcatccaagctatttgggtgatttcaaactatattgctattataatagcgtcagtgtataccttcgctactaaaagcaattgggcttctaatgaagggatatgtaaaggccatgacaccctctgatgtattgagtttgagaaactgcttagaaagaaaacatatggtggaaaaatggagggagtaaatatcaagaaaatttatattaatggactatgaataattatacaagtgcaactgatatcaaactttaatccaaaatcttaaaatttatgtttatgaatcttgttttatttatatgatgtttaaactttttaattcttaaataacgtgaaatttctttccatagttatactcaaccatttttctctgaagtataagtctcatatcatagattttctcttgaaccaaagtcatttttcaatcatctagtaatcaaggatgattcttagaagtagggattatcccgactctttttctaagaatattcaaagtatatatatcttgggaaaaattctttaaaaatattattttttatagaaaaagaagatagaaacgtaaatgtgtacctaatctaccctgttgtcctttttcgttcaattgttaatgttttcttctcccaatttttcggatattactctatataaaatactaaaagttaatcaagtgaaagtttttgaaaaaaaataattttaaccccgcataattttaaacatcaccaataattaaatacatgaaaatagaaaaatatttaccattaaatattggataaaatctaattaatctaatgcaataacactttttatcatctatatttatttcatctctcttctctctattttcttccccagttgccctcaactctactaaatccacgagacagacgtacgtacgtgttcccacttcagcttcctttaaacttttttaatctctccaattcttcttctcattctattatttattcatactttttactttagttcttttgttttttgttcatatataagtgtgagaatggcttgaaataatccaatttggatatttcagcatgcaataaaaaagataagttttcagctgcactttaaaatctaaacacgcggaaataccaaagtatatatatcttgtgcaggcgcagagtcgtcgttctactaaggcgatggccgcggaaacatcgaggtgtctttgtctgacccgtaaatacgaattatggtactcatcactcgtcatgaatcatgtcacaatggacacaaaatacatattatataaaccctgtatcaccaagacacaaacaccactccacaattgcttccttttggcagcaaaaatatatacacacttcgcaatagcaacgatgatttggatagccatttttttggtttttcttgcttatatgtggctacggagaattagcaagaacaaggcaaagaaattaccacctggtcccagagggttgccaattttgggaagccttcacaagttgggaccaaatcctcatcgtgacctgcaccaactagcccaaaaatatggacctgtcatgtacatgcccttaggttttgtgcccaccattgttgtttcttcaccacaagctgctgaactgttcctcaagacccatgaccttgtctttgctagtagaccaccgcttgaagctgcaaaatacatctcttgggagcagagaaacttaagcttttctgaatatggctcttactggcgcaacgtgcgcaagatgtgcacgttggaattgctaagccacaccaaaattaactcctttagaagcatgagggaagaggagcttgacctgatggtcaagctcctgcgcgaggcagccaaagatggagctgttgttgatctgagtgccaaagtttcaacactcagtgcagacatgtcttgcagaatggttttggggaagaagtacatggaccgcgacttggatgagaaggggttcaaggctgtgatgcacgaggcaatgcacttagcagcaactcctaacatgggagattacattccttacattgctgcacttgaccttcaaggcctaaagaagcgcatgaaagttgttggcaaaatcttcgatgacttcttcgagaaaattattgatgaacacttgcaatcagagaaggctgaagacaagacaaaggattttgtggatgtcatgttggactttttaggtactgcagaatctgaataccgcattgaacgccccaatatcaaagccatattgctggtaaaatgaataacatcgttaagcctttttttccactctctatataactatctatctatatatattagctgctagtatatgactatatatatacgagaaaaggtggcatgatgaacatatgaagtatcaaatgttctacattaagttggcaactattagaactggctgtcaaattctcactctctttgacccatttgtttttttggcataggatatgttggctggttcaatggatacttcagctacaacaattgagtggacgctttcagagctcctaaagaatccaagggtgatgaagaaagtccaaatggagttggaaagtgtggtgggcatgaagaggaaggtggaggaatcagacttggacaagttggtgtatttggacatggttgtaaaggaaagcatgaggctccatccagtggcaccgttgctcataccacaccaatccacggaagattgcatggttggagatttgttcatacctaaaaagtcaaaggtgatagtgaatgcatgggcaattatgagagacccaagtgcttgggatgatgcagagaagttctggccagagagatttgaaggaagcagcatagatgtgagagggcgtgacttcgagctgataccatttgggtctggcagaaggggttgtccaggattgcaattgggtctaactgtggttcgtctaacagtggcacagattgtgcattgttttgattggaaattaccaaatgacatgttgccagatgaattggacatgacagatgagttcggcctcacaatgccaagggccaatcatctacatgccattcctacgtatcggctttccactgaaagggattagggaaaaataattccgtagtatgtattttgatagctacacaagcaacacaggctactccagcaaaaccaagaggaccatcagaaaaccaatccacctcagcgactacgtataaccaactgcacatgagtaaaaggacaatagtcacagagaatatatcaatattctctttgtctcgtcagagaaaatcccttataacaaacattctagaaattctgctaactggctatgattgataacaaacaactttcgtttgtaatttctctatatatatcagcagaataaataaatgaggcactaagttgttatccattatttctcttctttactgccttagttccttagtctaacatattttatgtttaattaggttgatttcaatgatatttatggaaaaataaattactctttttccttccttatcgttaggaaattagaattatgtaggtcgcatacgatagagattagtttctttcctgtaatttagagacaaatgaaccttacatgttgtagagaatttctatttattttttgtactgtaaagaaagataacaagcaaaactaaacaattgacactaaatccgtggtgcctagagcttcaagagcaaagtcagatggcacctgccactcatgcttggcagggctattctgatcgcaaccaccgagccagcaacttaacacatcagccacaaggttacaaaatgcatgtgaattatatattaactagtatttttttcttcaatatatgtttatctatatagtaatcacgttggatatcattgatcaaattatcttcaatcctcatgattcggatatcatcctatcactgccattgtttatttcggcctcggatgacgagataatacggagtttcagcaagtctggaatctatactgttcgtttcttcttatgatcaccttatggaaaaatgtttcaaagggaagaactcaaggtcactggagattggcttcttgtttggcgcatgcatatcccaccgaaagtcaggcactttatttgtagatctctttgcaattgcatgcctccctacaaggcaacgttttcaacaaaaaggtgtgcgtgtcttgctgcaacttatgttcttattgtcaaactaacattgagatcgaatgcttggcatattctttttggttgtcaagaagttgcgcaagtctgggaacgtctgggttgtggaaccacatatcctacaaagtgcaataggcagatgtttgaatgaagaaggataaaataatttgtaatatattaggagatataaagttggtaagatgattggagaaggataaatgaagaagggagctaagggaggggggagggagaatgtcacgtattccaattctcttaattgatatttctaataaaattaatatttatcaattaaaaatattataatatatttatatttgcgaaagaagggaaatgtgtatcatagtacaagaggtgaggataataatatttgcatatctcaagagatggtagtataaatgatactttagtaataattattttaaaatagataatggaaacttaaaaatagggtgaagtattagatatatccaaatttattaggggataaaaatgtatattttaacataagaaacaaatgcaaaataatactctcatatctcataaaagagaagtataatcacttgttgcgtactcggcaagtgcaccggtcgctcaagtaataaagtgaaagtacgggatttgtcgttcccaacgaggattgtttgaccaaataaactatacttgatatcaatacgttggacggtaaataaaatgaatgaataagatttggttggtgtgtttggtgtgtacaaattaaattaaacgctaagtgtaaacataaactaatatcaacaagtaaatggagggataatgatatgtaagggaatgtagttagggcaacccacacatgatgtttctttcaaaggaaatgtattgttcactacattcatttatctaaactatttagctaaagtgttttcataagttaactaagcttagatccctcgccacttagttctttaacttacactccaaccctaatcccttagcgattttcggtgagttaagcattaagcaaccacataaataagtagagctacaagcacccacccctattcctaggtgatgttagcaagttactacacttagttccaaaccaaagccccaatattcctattgtgaaccctagtttcacactctcacaaagaatggccaagtccaaggaaaagatgaaagaattaaagcaagtgcagtaaaatagcctttgataaatgaataatagcattcaatacatcccaatgaaatttacatcaaatgctagtgccctaactacaataaaagcttagccaaacctcatgttgagtggctgaaatgcaaaaagggacatacccagctgaagcaaggaagaagaagatggagatgcaactccacttgtgccttcaatctcccaaaaaccctagctaaggaacccaagctctaaaaccctaagtttgtgtttttctccctccaaaaaacgtgcattgaatgctggtggttggagtatttaaagccctcctcgtgaaatctctgttctgcccttaattgtggcttctgtcgacctgtggcgtctttggcgccaggttggcgctccaggcgccggcttccagaggctgcggcgctcgcggcgcggttaacggcgctcaaggcgcgggactccaggggcaatggcgcccagggcgcggatacggcgctccaggcgcccagctccagaacttgaggcgctctaggcgcggagcttggcgctccaggcgccagctgcacttccaagttctgctcatttctcctggtttcagcccattcttggtgtctttggtcgatttcctgacaaattcatcaagataacttaaattatacacaacgagggcaataaagaatgctttatgctcaatttttgttctaaaatgcttggaaattccttatatgctaagcgcatatcatcactcaataaaaactaagggaaacagaaacatagatgttgtcgttttatgtgttcgtatttctattaggctaaaattgatatattataatattttttcttattatatatagacatatatattaattttaatttaataatttatttcatgtctatctatgtatgtgaattgacattcgttaatttttaaataaaatgttaggtttatctattgagtcttaattaagttgaatttaaataaatgatttttatatcaaaattatacattgcatagaaataaatattgatcaaccctaactactctgtatgttttattgagaaacttcaaacgaccatttaactcaatgaccctacaaccataaattaggctcacgtgatctggaataaatgcgactgaaaacaaataagcgttagttagattttctatattttttaaagcattttctcttattaatttaaaaagatacccttccgtttctattaaacagaaaaacttgtcaacgaggtgtgcttgcagagaaaaattattaggtcctgaaccctcacttctcaataattccaatccatatctacatatattcaaattataatttacgagaaagaattataataagtagtacttgattatattggcggatgggatatgagaacaattgtcctacaagataatttttttacttaaaacatattaattaataaaaaaaatactctcagtacatatttttaagcacatacaatgaatcaatgacataaatacacactttaactcaattgtaatttatataaatatagttaatttaaaaaacaacaattcacaatattatgtattttataaaaatttatactactaatatttttttttacaaaaatattacaaattatttttagctaaataaattttctgaatctgatgcccgatattttttggctaaatgattcaagaacacctaactattagttgtctgtagcatggtggcgaccaattgcgtttatcaaataaacacgaggaaatactgtatcttgtgcaagccattgagttaggcagaatagaatagtgaccgttaaaatatcgacaacgtcatctttgtctgacccgtaaatagaaattatgcactcgtcattatataatccttcatcacaaacacaacttttgtataagcccaccagcggcttttggaaactaagctatacacttaatagctgagatgattttgatagcattttttttagtttctctttcttttctgtggttatgcagaagcaagaacccaaataaattaccacctggtcccagagggttaccaattttgggaagccttcacatgttgggagaaaatcctcatcgtgacctgcaccaactagcccaaaaatatggacctgtcatgcacttgcgcttaggttttgtgcccaccattgttgtttcttcaccccaaactgctgaattgttcctcaagacccatgaccttgtctttgctagtaggccacctcttgaggctgaaaaacacatctcttgggggcagaggaccttaagcttttctaaatatggctcttactggcgcaacgtgcgcaagatgtgcacgttggaattgctcaaccacaccaaaattaactccttcagaagcatgagggaagaggagcttgacctgatggtcaagcttctgcaagaggcagccaaagatggagctgttgttgatctgagtgccaaagtttcaacactcagtgcagacatgtcttgcagaatggttttggggaagaagtacatggaccgcgacttggatgagaaggggttcaaggctgtgatgcaagaggcaatgcacttagcagcaacacctaacatgggagattacattccttacattgctgcacttgaccttcaaggcctaaagaagcgcatgaaagttgttggcaaaatcttcgatgacttcttcgagaaaattattgatgaacacttgcaatcagagaaggctgaagacaagacaaaggattttgtggatgtcatgttggactttttaggtactgcagaatctgaataccgcattgaacgccccaatatcaaagccatattgctggtaaaatgaataacatcgttaagcctttttttccactctctatataactatctatctatatatattagctgctagtatatgactatatatatacgagaaaagttggcatgacgaacatatgaagtatcaaatgttctacattaagttggcaactattagaactggctgtcaaattctcactctctttgacccatttgtttttttggcataggatatgttggctggttcaatggatacttcagctacaacaattgagtggacgctttcagagctcctaaagaatccaagggtgatgaagaaagtccaaatggaattagaaactgtggtgggtatgaagaggaaggtggaggaatcagacttggacaagttggtgtatttggacatggttgtaaaggaaagcatgaggctccatccagtggcaccattgctcataccacaccagtccacggaagattgcatggttggagatttgttcatacctaaagagtcaagggtgatagtgaatgcatgggcaattatgagagacccgagtgcttgggatgaggcagagaagttctggccagagagatttgaaggaagcagcatagatgtgagagggcgtgacttggagctgataccatttgggtctggcagaaggggttgtccaggattgcaattgggtctaactatggttcgtctaacagtggcacagattgtgcattgttttgattggaaactaccaaatgacattttgccagatgacttggacatgaaagagcagtttggacttacaatgcctagggccaatcatttacttgccattccaacttgttatcgccttcaggatgaaagtggctaggagaaaaaaaaccacctggttgcaacattgtttctacgttatgtttggtggggtctatttgaataagatgcacaggaaaataaactaccctttcccttttcttaatttttttatcatcatcgatatcaagaattattattatatgtctatctttcaatgaaaagattgtttaattaggaaaaacaatttaatagtatgtttaattaggtagatttcaataatatttatggaaaaaagaagttaccctttctcttcctttttttatcagtaaaagtgaataaaatgcattaatagggacctttcccttccttaccttaaagaaataatagttgtgtctcgagactctcttgctttagagtatagatggaacataactcaagcgattatagtcacttgtatgatccttgtcaagtttttcaaagtgcaaaaggcaatgcttgatcttttaccatacgccttagcaaacaaagcagttcttggcttctaatctgttgctttttaactttctctccaggcgacttagtgggactttgcacggatgttgttaagatcaaatgagcagggtatgcataaaaactaagagatggctatgggagtaggcacaagaagttgaccactatatgcggcagttgaaagtagattgatgatatatgtgacaatttgtgaactaaaagtttgtcaaaaatgtttcgtcaatacgtggaagtgttttgtcaaccatataatactgcatgtaacaataacggtgcaataaattactaagagatactcttaatattacttgcagtctaattttaagaataataatgatatctatctatatatatctaacactattactactatttatttacacttctttctcaaatgtctttcttggtgtgtagtagtagcataactgcataagtatcaatacagcatttttcttttttagttttaaacatcaagaccgtctgaaaaagagactagcaactatgataaatttaagtaaatgagaaaaggagtcattgaagaagccattcaccgccaactcgccaagcaattatttagaatgtgtttgttttttagtttttaaatttaaatttgttttcagttgtttagaataagtgagagcaatctaaaatttagaaaattacttagactagctgttagttcttttgttgtataaagagattcacaactgaaaaatatcttaaatcctacaccataaaagagatttatattttgcaattatgtttaattaattttcatgtttattgtaagtgggcagactcagtagtctgtccttccgtgtgcctaaattcaatcaatctatttgccatgtctctctcacttactcaactgtgtttgagtttcagttcccatgtctagtctatcttcttctccttcatttgcaagttacggtactacttctagtacccatcctcgcgcggccccacttacccgaatttcatgcggtcccagacccaaaaggaagaaaagcaaccacaattcggaagcgcaagagctggttcgtttgctcacgagcaagataagcaacgacaaagagcctctggtgaagacgctggacaagtatgtcaagcaggtccgaactcaacattgcttttttctcttcgaagaacttggcaagcacgacaactggctccaatgccttgaggtccctcacttcccccttagcaatatcttttaaggttttaaatctttcatcgcgtttggtggacaattgcggctgatgcggtccaaattgcagtcgcggacaattaaaaaaactttatgttgtggcccaaatcacggttgccatcgttttttaaaacctttcttatcatttgtaaaattgttgtctggtgctgaaagatttatcatcattattattattattatcactattactttttaaataaaattagtacattctctcgttcattaaggttggccttttatgcatataacaatggtaatatcacaaagtattgtgatgataactgtgatatgacctagaatgagagaaaaataaacaaataaagtgtgggaaaattggcagtaatgagcaaacagaaatggatacttctcattgttttaatatatagtatatacaatgcaagaacatagtaatatgcattagttaaaataggggagcatgaatgatgatgtcaatggttaactctgcctcattgtagttgtgaattttatttggcattcaggttttcagatggatgcaaaaacaacggtggtatgttgctgataatggggtttactcaaaactcatcagttatggggaaaaaaagggaaaaccagaatggctatgtggcttttctcggagatgcgtaatactggttgtggtcctgatacttctgtctataatgctctaattacagctcaccttcattcgcgggacaaaacaaaggctttggctaaagccattggctacttccagaagatgaaaggaatggagctgtgtaagcccaacattgttacatacaacattcttttgagagcttttgctcaagctcggaacgtggagtaggtcaattctttgtttaaggatcttgatgagagcattgtttcgcccaatatttacacacttaatggtgtgatggatgcgtatggtaaaaatgggatgatccacgaaatggaagcagtgcttgctcgaatgaagagcaaccagtgtaagcctgacttgattacctttaacttgctgattgattcctatgggaagaagcaggagtttggtaagatggagcaggtatttaagagtttgttgcgctaaaggagagtgcatcactgcccacgtttaattcaatgattttgaactatgggaaggcacggcttaaggataaagcagaagatattttcaagaggatgactgacatgggttacacgccaagctttgttacgcatgagagtctgatctatatgtatggcttctttgattgtgtctccagggctgcacaattgtttgatgagctggttgagtcaaaagttcatataaaagcttcaaccctaaatgctatgcttgatgtttactgcaaaaatggtttaccacaggaagcagattcactgtttgaaagagcaaatagtataaaaatatatccagattcatcaacatttaaacttctttataaggcttacactaaagccaaccagaaggagcttcttgataaattgctgaagcatatggataaagatggtattatctctaataaaaggttcttcttggatgctttgggtgctgtctaatgctgcaactgattcaaacgtatcaaattcaaaatctgctaatgcagctactgactcaaacaaccccaagatttttcaaagttgactagtcatgtgaagaatattttggctcatcaatgacttgcgtacaaacagctcagttcttgtgagatggtatacttatcctttgccatcacttctctatcatatgacatcactttcctttttttagttttcataatgatgctatttacttgatattatataattcatctatgagatgctatttctctgttcctgtgctgaccttgaaatttcaaactcaggcatgtttttggttttcagatgataagctctgaagaattatcctttcttattaataatttatgcaagtaccttcaaattacgaattcacaactacaaaacctggggcaactttaggtattttaaaatacttggttaaattggcatctgatgctgaaaattaatattcttaggacaaaagaaacaagaatacgagagattatgtttgcttattttccttactggtctgtgtataatattgatttcgtatgatttgcttgatttgttatcttgtaaagaaatttatgagaacaacagaatgtaattttattcttcactgtatttgtttttggtttccttaagttgtctgttcacttttaagttgtatctgttcacttaaacatgttttttttttcttgctggtcgttgcaagtttgccagtttcaaatgaagttctaaacccttttagtgaactttaaccaacaaagagataggcatagaagatcaagatcctattgcctaggcatcacatgttgtctggctttgcctttcatgtccgggttcatttttgttcataggtatagatgtatttccagctcattgccccttgtcttggcactatgatctatgaaatgaagaatgcatcagatctgacagctgccaaagctaattagttgacgacaaccaatccaaaaagagcatacttgctgctgaaaagcaatgtctaaatctgtaactaacaaaattgagttattaaatggtgttattgataattcatgtacaattatcattctgatgtaattttaaatcaagattaaaagctttctttgtcatgttattgaaagtaccagaaggaattctcagttgattgtgtgagttgctggagcggagctttttaagcttatacagtaaccatagcctcccaaaccgtttgcaaaaggattttagactatatatattttttatttaaacggttggccacgaccaataaggtagaagcactagtaaagaaaggagattgcatggttttgagttttttgaaaaggaaaagagggagatcaaaacgatcattgaaggaaaattgttgagaaagatttcatagtaaacatatctgacggatctaaatgattttatgtgatttgtgtaaccaatctcatctagtataataaaacttttgatgatcgtagtggtggtggttagtttaaaacgccacaccaccctaatataactaattgaaaagcaattgatgtctcttctttatttataactattgacgattttccctttgattgtagtcaagttgaatattactttaacatatttttccgtttgcctcttgaataaaatttgtctggattcgtgtttcatgactgggttcatttttgttcacaggtatgaatttatttccagcacattgccctttgtcttcgtggtactgtggcctgtgaagaatgcatcagactgacagctgcctgaaaggtatcaggcccaagattaacaaagatgaaagataacagcagaaagaaaagaaagaagcaaagtattattgattaactttaaccaacttgaatatacttgtagattttcgatcatcaatgtcagaaccccaatccgaatcacagaaagctataagtctagagtcctgggatttgtgaaaaactaagctatgagttaatgtgcctgccaaatatcttaagatccttttgacagcctcccaatgcacttcaagaggttgatgcataaattgactgactttatttacagcaaaggagaggtcgggacgtgtgattgttgcatattgcaagccaccaacaattgaccaatataaagttggattagaaaaagttgtatctccatgaatagacagtttctgattggtaaccattagagtcggcatgggtgaggcagagtgcatattcgctttaaccaaaagatcaacaatatattttgtttgtgttaaatggagagttgtaggagaaacatatgtagcttccaaaccaagaaaatactgaagatgaccaagatctttaagagaaaactggttgttgagttgagagatgagtaaagaaatggcagaggaatcattgcctgttagaagaatatcatcaacataaacaagaaggtaaatagcagaggaagaagtaaatctggtatataaagatgcatcagattttgtattctgaaacccaaatttttgaagagtttgattgagtgtatgaaaccatgcacgaggagcttgtttgagcccataaattgctttgtttaacttgcaaacaagatgagaattggcactgtgaaaaccaggtggttgatgcatataaacatcttcttgtagaacaccactgagaaaagcattgttgaaatcaaactggcggatgggccacccattcatgagagctatggagataatgagtcgaacagtaggtggtttaacaaccgggctaaaaacttcattaaaatcgaaaccttcttgttgttgaaatcctttggcaactagacgagctttatatctgtgtatctgtccatcatgttgtcttttaattttgaaaactcacttgcagtctatagattgaatatgaggtggaggtgaaacaagagaccaggtgtgattattgaggagagcggtatattcttcaaccattgcttgtttccagtggggacaatgcagggcctgagagatattaagaggttctgagtttgttaaatcatgagtgatagacttggaggtggctgcatatgactttggtttaaaaatgccagacttgctgcgggtttgcataggatggctggaaactgtaatgactgcttctaattgaggaggagaggtagaaatagatggcaaagctggagcaatgagagaatctgaaacagacacacttgaaataccattagaagtacctgttgaatcctttaaaacagaagcaggaatttgtgcagtgactttagccttagaaatagtcgggatttgaggtaaagaaggagaaaaagatggtgaagaagtaacagaagcattgttgaataaatcaaaatagggaaagagtaactcatcaaatataacatctctagaaataatcattttaccagtggaagagaaacacttatagcctttatgattaacagcataaccaagaaaaatacatttggtggatcgaaaatctagtttatgcttattatatggtcttagtaaaggaaaacatgcacaaccaaatactttcataaagctataatctggtttattatgatgaatgatttcaaaaggagatttaaagtcaagaacaggtgtaggtaggcagtttataagataaatagcggtggtaaaggcttcttcccaataaaataaaggtaacttagcatttgcaagaagagctaatcctacttcagtaatatgccgatgttttctctcaactctaccattttgttgatgagagtaaggacatgtaagtctatgagtgatgccattaagatgcagaaaattaataaagttgtgtgaggtaaattctttggcattatcagtctgaatgtttttgatttttgaaccagttagcttttcaatagtggtcttatattggagaaatattagaaagacttgagatttattgtgcaaaaggtaaagatagttgtatctcgtaaaagcatcaacaaacaacacgtaaaatctgcagctagaggtaccagaaataggagcagggccccaaatgtcaatgaaaatcaaatcaagaggagaattataagtagtagaagaagagaaatgaggaagctgatgtatttttcccaaacaagcttcacaaacagtagaagcagaagtatttttattagcagtaaatggaagattacatttgtttaaaacaactttaacaatgtgaggaccagcatgtcccaatcttttatgccataaatcaaacgaatcaagcttagaatacaaagcaaacggagtattttgaacagaataaggtggaagcacatgaacatctttaaattggtagagaccatctttaagaaagccctggagaacaactttcttgttgacctgagatttgacaagacagaaatcagggtgaaattcaaaaaagacattattatctttggcaaactgtgaaacacttatcaaatttttagttatagatggcacatgtaaaagatcattgagcttaaaaacagtagaagaattagaatgagtgaagaaagattggccaatatggtggataggtatacctgcaccattaccaacatgcacctgatcagctccattataatcagagttggaggaaaaattaccaaggtcatttgtcaaatgatgtgttgttccagaatatgggtaccaggatgagtcaacaaaagatgcaggtcctgctagatatgctgaaggattatgaaaggaaagaggtgggggcggaggtggtggtcttggattatgcatctgagttgaagaaggttgatgtaaaggtccttggttggtgttctgatatgttgtgtcatacctataaaagcatcttgatgcaaaatgaccatttctgccgcagatttggcattgaagtttgttttgattccagaatgagccttgatttctgttgcctctagagctgcgacctcctctgcctcgtctgccaccaaaagttcggttgccattgtattctggtgtggtgtttctttgattaaagttggcttgaataggtgtaagatcagttttcttgaatcgatcaagcatgtcttcttgagctagaaggaaggcttccaattcgataatagagaaaggaggaactctggacattacagcagtgattaatggattatattcttcacttaatccatcaaagatagcttcagaatattctgcatcagtgagaggagatcctacagctcccaaagaatcaacaacctttttgatttgaagtagatattcagatgctgggcctttctttttgatggatttcaactgattcttgagttgcttcacttttgcttgcgtgtaggaagaaaaataagtctggagttttgtccagatttcatgtgcaaacttaaagcccaccattctatttttaaatgacatattcatggatgaaagaagccaagaaacaagcaaattatcttgttggtactagtgggtgtatgttgcagcatcatgcatgggagttttgtccttgttgagatgatcttgaagattatggctataaatggaggctaaagcaagctgttgccatggcagaaagcttttttcatcaagtttgtctgcaataggggtagagaaggacttcataacaagccctgttgcctgtgtgcttgcattgctggtttcgaacctcggagactctaggttggcatccatggatcgactgaagctctgataccatgaaaggtatcaggcccaagattaacaaagatgaaagataacagcagaaagaaaagaaagaagcaaagtattattgattaacttgaatatacaagagaggtagctatatatatatacaaggcagctaacaactaactgatataactaacttttaactattctactgtcactgtcaaagctaataagttggtgacaaccaatcctaaatgaacaagcttgctgctggaaagcaatgagtaaatctgtaactaacaaattgagtttttatcaatgatgttattgataatccatgtacattgataattcttgtgtaatttgaagtcattactaaaagattgatttgtcatgttttctgcacagtactaaaaacaacagagtaataataaaaagatatgacatatgcagattattcactattaaatgaaaagaaaagtcggtgcaggtgattagtgaattcatcttccaactatgttgatactatttgctgtttttcaaaatttgggtgctagaaattcatggttcagtcacaaattacctttatgctgttgttgttatcacaaatcaccaactatgcattataattaatttgtggacgtgataccacctatttaacatctaattaaatatagatatacatgattaaaaattataaatataatagattatacgatgtgataaaagaacaaacaaacaaaatatagcaaaagtgtttaaaatagaagaatacctaccttttattactattttttttttaaatcaagaagagttagatctaatggggtttatctctcaccaggcgacaaaaaaagatttgaatctatataagaggtatttacgttcgacgcccaaaataaaataactggccatggccatgggtccacaaattaaaatcttagcaaaactgcacggaaagtagaatgaagaaaatctatttttgtaccatcccacattatgggttgtggtggcccgttcgcattgttaaattttaatattactacttttttcagcttgaatgggtagctaggaattttattttcattcaaccttataagaattactcaattaccaaactagggagggaaaaaggtaaaaatgctaagaggaaagtaagtgaggagaaaatacttaaacaccatgaactgaataaaaaaaattgttttttttttcgattaaaaaggtataaattgttagtattatatagttagtgagaagattactaacaaatccctttaaaatagtcttattgtccctttaaatgtaaatttctttaaaagtaattttataaattaaaaaaatttattaattcatttatagatgttatcttatatttcaaatgagttatataagtaaattttaaaaattagttaatgaaaaatttattttatttataaaaatgttatttttttttagaaatacgattaaaattttatccaaataaatctttaataaacaattaagatataaaaaaaactcaaaatgattcaaatagcatttttgtttccgtatgtatgtaaaatgaaagtgattggtgaagggtgatagaatgcgaccactgtagcaccgaacatggggaagattgggattatgacaagttgatactataattaatcgggtgtttccttgttttgtgcgtcgcggataagatccactgattctgattcaataatgaatcaccaatgcctatgcgctgatcctgccagcaagcatagccccatttgtgtgtaagacagctagattcccatcaaacatgatctcattattcagatcataatcatcgtcttaatcttaagttctaaacagacgcgtctgtgttcagaaacacacacacacgcgtacttttgtttggatcgcatgtattctttttttataatgaacaatatgataaattatttgtgaactaaatatttcattatcattttatatgcatacatattaccatttttaattatataaaatataaattatttatataaaaaatcaaattatattcgtataacttaaataattactacatcatttaataatcttcgtaaaaattaggttgaattaacaaataattagtgtaacaaggaaataccatttttagtattcatgattctcatagaattaatgaatcatgatttttaatatgaaaaaacttttttcctatcacatacttttttaggttaacaaaatatttaagaagagtgctaataatgtaatacttctgatgcactatttttaacactccttctgttattagctgaatttttctaaaaactacaaatttaaaagagataatattaaatgataaatgaaatccacaatttttgagatttttaataaattttagtaaataaaaaaatgtattgttatcatttttgaatatttaaaccaagatcctgactgaccttaagctgaagggacataatcgtttgcttgtctattctatatagtaatgtgagaatcatcttttctataaactgaaagtatttttctgatacgagttaattcccataatgaatcttaactctgacgtttttatatatatataaaataaggcaaatatttagtttagtatttaaaattattagacgttcctttaaatataaaaaattaaaattttatcttcaaatttgtaaaaaatataataaattatcttattgttaatttctttaacttaaatagttatgccatgacatattcaataatattttatttgttacgtgtcatttatgtaattatcatgaacctgaatctaataataaattgttattataatcttaaacttaatcagttattaacattcaatctctaaacttatcagtaattaccacattatcattcaaaatcctaaagtagattatttatgtatccaaaaatatcttcttttttttttctctttccactaacatagggaagcctcaagtgtgtttattacttttttaaaaacatgaggggataatgtagcgtaatattattattttggtagtgttagaggtgtgaaaagtttgagttgggttgaattttatttatttttaaattaatataattaaaattaattggattgaattgaattgagtttattttttattttattaatttaattcaactttaactgaattgtattgagttggttattggattgagttattaaaaatttgttacttttttaaatttaaaaagaatttaaagaaatcttcaaattcaaaaataataagatttttttacaaaatagtaaagatttttttaaaattcaatattcataaaatattatactattcattgataaaaaaatcataaatatatattcataatatcattcatataaaaatgtattactttaaaataaataaaaaatataaatttaaaataatatattagtttaagataaatgttatatatatatatattcatcgtattcccagatagtgtaataaaagttatttttttattgaattctttaattttaaaacgggctaaaaaatcaggaaaattgatgttctctgttttaagaatattaaattcaatttaatggtaaaaatcattatgtgttgatcgtgataaaaaagtgacccctttgaagttttttaaccttggaatggaacacgagatctttttcctatttctaatatttgattcatcgtacgtgggggactcgtttagattcctctccacgtcagcatgcattccctccttccctcaaccgacgccaaatatttcagattttcagtttcacatatgcacatgtattctctctctctctctctctctctgagttgtatatacgcccacaatctagcgtcgcgtgtcagagcaactcgtgactcactcactccccacaacacaaacacgttaataaaataataaaatactatatatatatatatatatatatatatatatatatacccacatcgagtttgagttcatcgaaaaatcagaacagaacccaaccaaagcagctatggcggcgatgcagaggccactcaagagaaccattgcaatcgccaagcaacgcgcgtgcttttcctctctccgaccctccgccgcagccgccgccgcctccgacaccgtcgcgccgccgcagctccccccgttcgatcaccagccacacccttacaacggtccctccgccgatgaagtcttcgccaagcgcaaaacgttcctcggtccttccgtcttccacttctataagaaacctgtgagtctccgaaatcgacaccgaccaccttagcatccccgaaaccttttctgtttcctttcttctttttttttttttttttttgttttcgcgtaatgtgaatctgtaatgtctgtgaagattgatgcgtttccgatcaggcaaacattttcggatttagcaaggtgtctgttttctaaaatttgttagtctcctatacacatatttttttatccgaaaagtttgtttcttaaactcttgagagaatgaaaacatctctcacttgttttgaaaactgttccgatctcaagccagctgcattgttaggcttaccacttttgacttttgagtgattgttcgctttgactttcgtgtaggcttcatgattccaaaacaattgggatttttattattttgtttttttaccggaacagtaggataaggggctagagggtttagaaaataatctttgaaacaaaaaaatgagaagaaaatcatatagtcccttgatgtctctttttcatcattttgtttatttaagagatgtgtgattcaaattttgaatgtgttagctgaatatcgtggaagggaagatgcaatatctgtatgatgatagtgggaggcgttaccttgacgcatttgcgggaatagttactgtttcttgcggacattgccaccctgaaattctgaatgctatcacggagcagagtaaacttctgcagcatgctacaaccatatatctacaccatacaataggtgactttgctgaggcattggcagcaaaaatgcctggaaatcttaaggtctgtttttcatgttcctcgaatatttgactgtatgattgcattatgcctcccattcttgaaatgccttataatatagttttaaattgtgagccataaccgcaattgcagccgcaatgaaaagggtttttgacccaatgcaaccacaattgtggtcacattagccgcattttccttgctcttagtgttcagttttttaatgtggctagacttcttttgacaaagaaatcaggatcctaattgttgacagttaaaaacatgattctaaattgcaggttgtttattttgtaaattctggttcagaagcaaatgaattagcaatgatgatggcccgttcatatactggtaatcttggtatgatttcgttgagaaatgcatatcatggggggagttctagtacgcttggtctgactgctctgaacacgtggaaatacccaattccagaggtttgtctgtaaatttaattataattttcaattggtctgttgatcatatatggaaattattcttaacaatgatttaaaccttttagggccatgttcatcatgttatgaatccagatccatatcatggagcctttggtacagatgctgctagttatgcaaatgatgtccaagaccatattgactatggaacttcgggaaaaattgctggatttatagctgaatccattcaggtatgtgtaatatagggttactctaaactggttatcatcccgtgagcttaatattataatcttggagtcggactgcaagtagatcatggacagcatcaaagttagaaggtttcagaataatgaagttggagatttagaacatcacattgcctttttggtttactttttcttcatggcttattctagggagttggcggagcagttgaactggcaccagggtatttgaaacttgtttatgacattatacataaggctggtggtgtctgcattgcggatgaagttcaaactgggtttggccgaacaggaagccattattggggatttgagacacagggtgtcattcctgatatagttaccatggcaaaggtctgtaccatcatatcattgtttgttttactagttcccgaaaccttgataccttaatcatacatttgaaatgcaacattatttgtatcttatgttgttcatcatgtgttatattcttttagcataatctcatgtttttctttaaattttcagtttaagatattttatttttggtatgttttcgttaaagtatgtattttttctctgccatatttcattatggaaattattttgttctaactttttaaccttcatatcttctgctgctatttcatcatatctcatgttaacttgtatcagggtattggcaatggtctgccattgggagctgtagttacaactccagaaattgcaagtgtgatggcccaaaagattcattttaatacctttggtgggaaccctgtctgctctgctggtggacttgcagtgcttagggttcttgataaggagaagcgtcaagctcactgtgctgatgtcggatctcatttgcttgaacgtttgagatttctcatggaaagacatgacagtatgttgtcttgaatttaacacccccgaaatagttagggtctgattgattctcttctcgcttgcttttgttttaaaatttgtttttctaaagcaatttttcactcagcaatcaatttcttgttcaaaatttattttttttcaaaatcttttacaaaataagtgttttaaaaaccaaaaaaaaaaaacaaaaaacagaagctggaagatgttttctcatcctcatttgtttcttcaagtgcctctggagacaacttttagaaaacagaaatgtgtccaagagacaaacacttccaaatatatttgggagacaaacagattttagaaaacagaaaactgttctttaaaaacagtaaacaaacgaggccttagttttttttttatattttgtaatacacttcattgtatggtacatttacactttctatctaatgcattctttattaggcaggggcataaactttccggttgagaggtttccatattactctactatggagctgtatacacaagaatgtttctcatgtttctgctatttttgttgattattctcattttttgtataatgtgccagtcataggaaatgtcaggggaaggggcctaatggtaggcttagagttggttactgaccgaaccaacaagacacccgcaaaggctgaaactgctgttgtgtttgaaaaactcagaggttagacaagaaccattttattttatgcatctgaagccttattttccaaaataacttccaaagagtcttaacaatttatttgtatatgcattgaagaactcggtgtgctagttgggaaaggaggacttcatggcaatgttttcaggataaagccaccaatgtgtttctccaaagatgatgcaggtatagttctgtcctcgctctctcaacaaacttagatgcaaaatgtcattccatttcactgacagctctccacgtgtgcagattttcttgtggatgccttggactattctctatctaaattgtgagctgattgtgcatcttgctagcatgaaatgaaatcttcgataatgaagccaaattactacaagccaacaacaaaaagctcatttagttcacagaaatcaccgtgaataatgtaatgttctccccgttgagaagagagggggtttccctcccttttgctgaacattagaagttgaatgcaaagtattgtatataaatttgggtttcatgacatcaaaaagttgcattcaatcgaaagagtaatgtttaaatccatatacaaagagactacatttgcatattggcttgtatatcaaataacgaaatcaataacctgcacgagttgccttattcaaaattgaatcgcgtaaccagcgtcgtatctaggtaccaattatgtaaactttagtgtgttttgtgaaaagaataatgataaacgattcaaaatttaatgtaaaaattttgtactaaagttgtccaaagttattacggtcaagtttataaattattcagcattaaaaatattcctattatgaataattagattttctcatcggcaattttgattaacaaagatgaaaagtgtattttggacgaattgctgaattaggggtgacaataaataatattaaattgacaataggcacatcctttcagtaactatctaaagatttaacttgtattatagtagttttctttaattatctctatcaaagaaaagaaggattatgcagttttaaaaacacgcagctgtactattttacattttacatgaccttaatgaacacgtatttacaacttctcaatgctggaaaaatgccgagcagccggaacatgatgataagtttaagggtgtttgctagaattaatatttgatgactgactgagcatgttctggaggacgattaacccaaagtttgctcaaagcccgcaggcgttgaaaatattcccccaaagcaagcagaaatcgaccagtctgatgtatggtaagtattcgatacatttgccgcaacgtttcttgccgtagatgatcagcctgtttcacataaagtttccttcagttagcccaaaagtatactttctaaacttgttttagatggaaaagaatgttttattgtttggatcaatattgttttctgttggagttttctccataaattgatgttagaaaaaaaaacataatttactaaggacagtgaatcttgtcaagtagattttccttacttatattgagaaggtttttcaattttcatgttaaaatagtttgtctcatttcttctaccttcatacattgttactgactcttttctgtctacctaagagttaagacactttaatagtttaattgtcaatacctccacaccaaaaacgaaacttaatctgtaataaatggatccttaatctctaaagattttattaccattttaatttaacctgtcactgggttggttcttcaaaaaacaaaatatcaccatagttagttatccatataaaaacaaagatcctttttttacctatccatcctgtgaccctcatggtcgattattgccttaccccctaattgcctgcacctcttccataattgcatttaaggatatcacaggttcctcttgttattcaatttcctcaactatctcaacattttcttcttcctttacctccataaggaaaacctacattttccttctctgaatgcaagcatgtcctggcccaaatttctcatgacaaaagtaacaaagacccttgatcctgtgtttatccaactccttcggtgtcaatctttgatggaaccacatattaggttttcccaaaattcccttagggtatgtttgggagagggagttaggaggggaagggagggaaaggaaaggtttaggaagagtcattcccttgtttgcgagttttaatttttgagggaaaggatttgaggatttttaaaactcttctgaaacccttcaaaccctataaattgttgtccctcctatttggggggtttttagaaggaaaagtaactaaaattattatcttatatcaacagtgttaataaaattattatcctaccatagttaatgtaaaatataaaatatattaattttttaaataaggaaaaaattgtaaaaatttcttattaactctctatttccctctcttaatatatttttaactctcaaacaaggggaagggaacttctctcattttcctcccttttctttccctcccttccccttgaatctctttccttccctttccctcctaactcccaaacaaagccttagaatttgatggaattgatggacttgctactaatctctgtccacttcttttcacatcaacatcaccctcttttcttgatatctccatgttttcttggaatcattcataccacccttattttgtaacaggaacaaacttctttcatgcaacttggccaacctagcagcttcaagaagtgttcttgacccaaacaacttcactccaactgccatttttcaggttttagccctgccatgtagcaactcagtttctgttgttcactcgatttcaccttacaaatcagtgcatcaaattctccctgatactcgttcaagcttcctccttgcttcaattgcatcaattgctccattggatcttcaaagatggacccttatctgatacgaagtgcttctaccaacataccccatgtcacacccttcaataccatgttcccacccttggaaccaattgtagaaaacttcatctagtgctatactaaccatggtaaccttattttcctctgatgtgccatccaagagaaaaaaacctctcacattttgatagccaaccagtgacatcatcttgtgtaaatttaggaaaatcaagacgagtaaatctggttgggacacgatactcaccttcgcttcgattcgagtcttttcctcggttcttcgattttctcatttgcaacattaaccctcttgtagtctcctgaatttcattgaattgttgttccgtcgtggttctttgttgatcaatagaagcacgtaatcgctcctccacttccttgatcgctgccattgtatgagtcgcatctgctattgtcgctcccggatcaggagttctgacaccagcgacggtaccaagggataattggggaagaatagagagaagatagcatagaagaatagaggaaattgagccaacaaatctgatgcttctgttattcacaataagtgtaatatgcaactgttctaacggactctaactacccaattacaatttgaattgttccatttacccctatttatagaattatgcatatcgcgtacccatgttctcctttagattcgtctctacttgtaacacgccttgaaatgagacaatttcctctccttttcctatgtaaagcaaggagaaaaaataaacaactcatttaaggaacaaaattccttactatttcacaggcctatgctccgatttttggagtacaaaacaagaatatgttatcgtcgtagcttgtatagtggagggaagcataacataacactaagataacggtaaaacggccaacgggcaaagcaaaaccaccccccttttcagctaggtctgttttcacggcacatctaattacatagcgtttgcttgcatgttttttacacgtgttccctgacgttttccacgaccattttaaattttatgcagaggctaagaagggctactttcaattggacttggataatcgcgtcaaaaatagaaagcaaacatatgcactgatgcttgcttgtttggtttctggaaaattgattctaagtttagaattgattttagatacattttcatatgtttgtttttactttaaaaaagaatttagaattgattatgagtctagaattgatttttgttgaagtaatttcaagtaatttatgtattgaacttaaaattttgtactgaattttactcattttactcctagcttgattttataataaaaacattcaaatataaattatatcatatcaaaattaattttacaaaatcaattctcaattttatttacgctcatccaaacacacttaattaaagcgtataatttgaggatgtataagaagaaaaagaatagctgcaaatcactttagcttttcagcagttcaactgccatatacttcatctaatccaatattatatggcccaaatcatgaagttgcaccacataagatatggcactattctaacacatacaaaaattagaaataaaaaaagccaatttacccaatccaaaacacttttttgtttatctttctaattaagcgcacatactaaaaaaaaaaaaaaaaaaacagcaaggcatctttgattgagatgacatgcaatgcaacgaaaagttattaaattgataagtaaatgggtgtgaataaagtgaagcctatgcattacctggttcacaaagctcacaagagcttctagcctctccattgcagtatccatttgggaaatatgggttccttcaactagttgtcctggtcctacagagtccgcaagcatttgctgaagtttttccataccttgtgaaagggcatcttctgcttgctggcatgatttttcaaggccataggcatcaaaccgttgttgctctgtcaaaggttcacttagagggaccagaacctgcaattaaaataaaaataaaataaagttgtttctacaaccttacatgataatatagtggagatatggcaacagaaataaaatgaaatcaagattgtgcctttagcaaagcatgttactgtgaatttgcatgcatcaattaaaaacaacatttggctacagaagcagaaaagctgactgggataacatcctagtttttgaattaaaaatcaaattagctcatgtgaataaaattcacatttaattagttagatattaagcatcacctttagaagttcagaggggcgaaatccgccaatccacaagaaaaatcgttcagctgttgtcttccacataccagacatgacatagaaaacatctgcttttgctgcagcagatttcatgccaaagagtttggtgtagtggttcattataccttgtacaagtgtcccgagctgtgtgtcaccgatatgagaacttaaagcagttctcagttccaaaatttgtctattttgctcctccacccagtttccatactccatcttgaaaagggttattcctgtaaattgggtattttcagagggctaaaatagttggaaaaaggagtttaatccaagaaaaacatacttaaaagaaatccgagaaaaaaatattatatcaaccaaaatgtagtatctgattctgatgtctactatacaaatcaagagttgcagtttgttacagaaagttgtacatagaactgatataaaacactcattttcaagatgcgtaatggtgcttatattatagtatcaacatattgacaattcaagagtatgggcctgtacaacatccgaacaatgtaaatatacaaaggtagaacaaatacaacacaaattttaaggattttcatctatgagactagataatctagtttggcagcaaatttcaactcaaatagttaaataaatataacggtgcctctaggcactaaagttttctaaccagtaagttgtgagggcagtttgtaagggcaatgatttaggaataggtaaaaatactgtcttctccaaaaaaaagttaattttagaaatgagagcactaaatgaccgagatatgtaataaccagtaaccacatttaacagaaaaatcaggagtagtgacaaatcaatatctagcactagcagtttaatgaccacaaacctgaatttaaagagccagcaaaatccaaattattagaacccaatccgttgccaatgtacaatccctgcagttatgttgcctcaagagattgacaagagaatgggaaaaaaagtagaaattaaaaatataaagtgatccatagcagaaactacgagtaaacacctgttgttttgcatgatctacctcttgctctaactgcacgagcttcaaacgacatgattctaactgctgcacgtatgcctgtgaagaaacatcagaaatcacatgaatattagtatatgtatacacttgttgcatgttctgtgtatctttcaaagcataaaccttcaaacctttttcctcaaacgactcttgcgagcagcctctctattttgtgctagacgtcgttgtgtctgcatgtttcaacatgttaaattccttctctttttttttctccgtataaggataaaagaagaagcatgaaacgagcccaacttctaaaatcggaagcagaagacccctaatttttcagtgcatatatctgaaagagttcaaaatgtgggtctaaaatactttctgatgtcactcaaaatttctacataaagctaaaaatggaggcagaagaaaagtgtaaatggtgtgcccttccatgctggaatatcaccaagattaagtccttactccttaagttcaaaatggtttaattgtctaaattaacttatcacattacaaaacaccctacataatgaggttagcgaggtgagagtataactatgacatttagtatataaatttcatgataaaagaaacttgttctgaagttaagcatagaagtatttgctttcagagacaatttaaaccgaatctttcacatgcagaaagtacttaaaaggtttccagtgttgaaactattccgaattagtaaaatatttcaaagaataactaacccctttatgctgtatctgaaaaagggtattacataacatggttttaccttatcagtaagtctgttagcatcttggtcgtacttcacagatgtgccaaatattccatgagtagcatcctctgactaggtgtttaacagcaaaaaagaactttattagtaggcaaaataggcattatcatttgcaaaagacaaggtataaatttggtaaacttacttgcacctgaaactgattatctaacttcatgtccacctccccaattatggatgtggatacagttaaattattaatatcattacttttgaaattttcttcccacgtgctaatatggtggataggatcatatacacccattcttcttgaggaaacaaacggtgaggatgtaccatccatgctctatggacttatcagtgcggctatttggtgcatacacatagacagaaagcttctgttaagaattaataaaaccttttaaaactgcatcaatcataaaatgcattaaagaagagctcacttagatactaataatgaaataatcagaaagcaaataacaattaaaatggcagatatttaaagattgactctagcgcaccataagaaaaatgccgtaaggcagaaatcctccgctgctaccatgttataagaaagaatccaacaaaagaaaccttatggtagcactgtttcatacactaattcatattgcatgcaccattaacaagtgacgttgatcacaaggaatcataccggggcaaagcaaaaaaggtcaatttgattggtaagaccggaagaataaagaaatctccaagcctcccttgtgatataaccaatctagaagctggagtaaatgaaagaagggggtggatgcattttaagaaatgctgattaaagaattcaatccccactgaatatcccataaatgtggacaattgtgtttggtagggactgaaccagagaacgaaaaagtttatggcgtcaaatattgtagacatgttagagttgaataagctctacaacttacagcgaatttgtaaattcattgagaaggaatcacgtttgggatgtgaaagttgctgtaattattagctttttaaaattagtttgaaacgtgaaaccaaacatgctattaattcgatctcttgcttaggtgacaaaaagatataaaagggtagccgagaatgatcaactttttgtacaggtggtgaaggacacaggagaccaatttctaaattttattgccaaaccaaggataaaggtacggtaaacaaatacaaactttgggcttgaagtaaatactacagattatgcacaagtacaaaaagcagcacaaagtacgcatcaattcttttaactgatccacgtttttagtttcttaattccttcaaagatagataacaattaaaacgcacgggatagatagatagattctcggatacttactagtccttattcaaaaaaaggcaacaaccaaaatcatcatttttggtacgtacgtgaaagcaaagccaaaacccgtatgcacactttttcaaagacaaaaacaaaaaatgattatagacgcaggagaagaaagtaccggtgaaggtgatcatagaaagcgcacaacacaagcaaatagttcaaaaaaacaaaaaaaataaacataaaagagctgtcatgtatttagtatctggctctcgtatctggtccttcctcgttttcctcggcagttaaatctttaaaattagaagaaaaggaaagggaattcttctttttttttttaaattttaataataaaaatatggcgaacctttgaaagctactttgagaaatcgtgagaagctttttttcacgcaaaaatcattccaccttccattggcgactcaccaccaaaaaaacagaacccaattcccaacgcaaactattatccaattgccaaccctaccctaatatcccatcacattcatggcaaggcgaaagcatagaattataattaatacgtagaaaataggtgccactttttttaaaaaaaaaaaatgaataaaggccactatttttttaattggactttatgttattttaatatgaaaaaaaaggaatgttatggagacgtggtgtattgaaaattagagagggttgtattttggtgcgttgtgtgatttgtgttgtgctacagagagtcaaggatttcacacaggcacaaacgaataggcaagcaataacatcatcgtagtcatggtggtcacatttccactaccattaatgtgcgcaccaggtagatcctgcagattggtggggctccctcgttgacatcattttacgattacgccaacagtatttctcaataaacactcaaccagaagttttttcacatgtctggaattatgattcggaaactatgaattctaggaattatatttttttactaatcaataaaatttgtttgcggtaattagaatcctaagataatttttttggaaatcaaagaattatataatatttttatcatattaaataattaatttaataaataataaaataatatttttattataataaaagaaaaattactcgaaaaaaaaaataagattttcagtttttatgaaaaaatttccgtaaaaattgactagaaaaacatttccaagaaacattcctgaatgttatttttaaaaaaacaattgatacaaaaaataaaaaattcagatttttaacctataatttccaaaaaatcaatttttttccctttcagacgccccctaaagtgtctcatagatatatagtaaatagataggtatatacaaagagagagggagagtatttttatttaaacattatttacattaattaataatatatcaaaacatctcttatgcataatgtattttacgaaaattatttatgattgaatatataataaactttttaacaatgttcttctcaaaaatatatactattttaaagaaaaatcaatataacaagtattattttaatgcattaaaaatgattcacatgcttaacggtactaataaagtcatttgattgcaaaagcaatcgtttatagtttttaacatagcaataactttacctcaaaaaaacatagcaataactaattataaaaagaaaatttgtccttcatgagaaacaaatgagtccattttttatcttaattacaagaaatatagggcccacttttaaatgaattactaattttattttatactcctaatttactgtcaactctattaataagatgttcattcattttttttaagtgaatattttaatagaaaccatctattttgatttaacggtaatgatttcacctctcacaataagatgctcttcttacttgatatatgtcccctgtatgtgtgtgatagactttttgaatcagagtaaaataagtaaatttgggttataaaatcacacatttatgatcaataagtctaggtttaatttgttcgatattacaacctttaggtttgattgaaggagcttcaataaaaacaattaagcttaatctaattttgataaatcaagcttgaatattcgtgatgttcttgtattgaatttattttttatgtaaatgattggaatgaagataaaacttaagtctttatgcatttacttcagcctccatcaatagggtgaccttagaacttgtttaggtgtagatttctctaaaaaatattttttaagaaaaaagtaaaataattttttcataaattaaaattagttctcaaaagttaatttgtaaaagttttttggtataacttttttgaaagattagaagacatctataaattagttaatggagagttaattttaatttacagagaaatttattttatttttttcttattttcttcacttaaaagtgtttttatagaaacttatctaataaaactctaaagtgagtttagattaaatttgcttacttaaaaagacaaaaaaaaagggggattcaaatttccttgatcatcaattaattaaatattcattaaaatcaattaggtaattacaattaatctgtttcggaaaaaaataggtatcaattagttttagtttatacatttaatttcatgtgtttaccaaatattgtagtgtttatatattttaaactatcatccctccttaaagtacagttcttctcgattacttgcaagtgatactcgttaatttatttttcgccctaattaagtcctcgtagttaggtaagtcttctctaattaagtcctaatagttaggtaagttttctttttcaaagcaatacttaggtaaattattaattggtcggtttgatttgatttttagataaaaattatttgaatcaaatataaaataaagatatgattaggttcaattttttataacaagattcaaaaattgaatcaaaaccacaaaaataatgtaatttttaaatttttgaattttgtgattttttatttaagcaatttttaaaattattttgatgatctataaacgtttaattcaattttgaacactttaatcaagaggattggaatgtttattatatagttaatgaagtgttaaacgattgttatgaaatcaatattcttagcaacccaatttgctaccgttatggattgagatatgtcatgacataaccagcaatcgaacctcatcccaggagcctgagatcatacataactcccatgccaagctttaatatattccaatcgagtgttattacttattggagcccaaagattcgctctaggcaaaattcgataagatgacgttaaaggaattaattactcgcatccttactccacagaaactcaagtccactccaactctatccaggtatgattggggattaaaaatccaaagaatttaggaattaaaaattactgactccacaactgtaaatgatttagtgtaatagcgataattaatgatgttcagaagaatcactctcgcattctgctcaaggtaattaagctgctggaaattttttttgttttttttatagataaagctgccttatattatttcactattcatatgggcaacaatacaattgggcaaaacatcaaacaaatagggactagcatgagccaagctatggccaacattatttgctctgtctcttaacaaagcaaacatcaacgtttgtgaaattcagaagaagtctatcatatttgataataatgttaccaaattccgaattatcctgactttgacagcgtatacagtttatcattacctctgtccatctccactgtacttttatgattctttatgattcaacaataacacctttaatttaatctttaatttaagataattaaaatcgatgatagataaatttaaagataaaaaaaaaattaaattaattttttcttttaatttattattcagattttattttattttattttattttattttaatttgattttctaaatctttaaaattgattcaatttggtattttagttttttttttaattctctaatttttaaaattgattcatttttaaaaaaatgtatattttgtgacagttaaaaatcacttaccatggttttaaaccaccacaaagtgtaacttttataatttagactaaaaaatcaaattgtatcgatttaaaaaaattagaaaattaaataaaaaataaataactaagaaactacttttatttctcagatgttctaaggcgaagagaagagtcaatgcctccccctctctgactgtgggtaagctggaaaagtactattagatctatgtatatttctcaaactaaatgtaacatttgtcagtagtttcatgtgataatataatgattgagaagaagaaaaaaaaataaatccgttaaattgtgtatgaatttacatatatttttattaaatatattatccaaacctatcatcaatgcatttacaataaaaataacttttaatattttttaaaagtaaattttaatgtttaaatataagtaacttaagtgaaatgaaaaataatacttgttcacattatattttttatacttaacaaagttaacattgccaatttttacattttttaagttatctcttttccttttgttttacacgttaacaatgtttcttttttctacacattctattttatatatatatatatatatatacacacacaaaaatgtgatagttgaaatggtagtttaagatgattaagagagaaattttttggctaattgcaaaaatagtttgtgaaatgcatttttagaagaaaataaaataaaatataaatatttaattgaaaaattggagaaaatatttcactcttcaaattatgtattctaattaatattataagagtatattatttataaaatttaagaagtttaaactacaatattattcaaaattattaagaaaatgtatatctggctaagaataatttgaatatatttttttaaaatatttttgctatggactaacacctagataaggccagactctctgatagatcgaagtcgggtgaacatgtaatagacccaataagatagttgaatcatccactattacacttgttaaacacagtaatagaactacattaaaaaaaacacacacagtaatagaactataaaaataaaatattgaatgacaacccttagaagtcaaggaaatagttggaactgcataccattcctgtattggcaagaatgacatcacaatgcacgataatgaacacagtatatagaggtgtataatatcactagaaatacatgtcattatccaatttgttcacctcttttctcacactcttgttaacttgagtgtcacagccattgcaagtgattaattactccaaattctaaaggaacaacaagagatattcctatcacctagctagactaactgtactatattccctattatatggactggtgcaaaacatattttaaagtcaatataaatattatttttaagaacaagaaaaaagtaaaaggcattaattaattctaaaacatactttaattaacttgatatataaaattacaatgttttgatttatttatgttttctttcggattacatttgtgaggacccagctgatttcgtcactaactgctcatgtctaattaattgaataaacatattgcaccaaaaggacaataaataatcatcaatggataaaattgctgatatggaacggattacgtgctttaaaatttccaataagaaataatttcataagtcaggataagtttaaattattgtatagaatattagctgaatgagtgactcttatatataactaaaaaaggtacaataatgttggtggttgcattttagaatggttggtcgacctattagtgattttccttttcatattctcggggtgcattggcttgatttgattactatcaaacacacaagtataacgtcacgcaaacacttgctggctttttcctattcgtggttttcatactcaagtgcaatccaaagtgggttgccactaagaatggcttttgggtctctcagttatgaaatattttttagattttagattctctaccacagtgatacatgtttttggcaaaacggaaacgtcaaacatggtaagggactaagggggcagaaaatttaaatgaaaaaatacgaattaatgaggatactagtcttgaatctagatactacctctctatttgattgagaaaggaaatttattgaaattttgaatgaaaaagaataaatttttatttttatttttaacgaatatttttttctttattcttgttcaaataaaaataatataacatttctatataaaaaaagaatactattgtttttttttctttgccgttcaaatatacacatgcctagtcgtaaaatattaactaaaattcttttgttatttctttaattcagtagctgcttctgtaacgtcttattctggcgtcattcgaactccttcttagcctactgtcactaatgatcggtcacgtcagcaacgtttttctttttcttaattatttaatttgattttcaaattatgttaaataatttaatttagtccttcaattttaaaaaatgaattaatttgctctcaaaaatattttaaataatttcatttaatagttcttaaaattttgagaatcaaattgattcatttttttaaatttgagaattaaattaatttatttttaagaatttaatgattaaattaaatcttttaaaaattatgagactaaattaaatctttttaagaacttgataactaaattaaatcatttaaaataatttgaggcccaaattaataattaagctttttttcttttttgtgtaacttcatttttcttataaataagtagatagtccataattagactctaaacatctttatctcaagttatctcctttcaaaagtagtttctattttattatattacaatcaagtattgagtgactagctattttcagaagtattttctattttaatattatattacaatcaagtattaagtgattagctatgttatatattttctctatataatcaaaaacttaaaatgacataatttgtgtaaaacacaaagaaagataagaacttctcaaataataagccacaaatataagtcacaaagtaagaacttctcaaataataagccacaaatataagtcacaaagtagtagaacaaccatttaaaagaaaattacacaaatatctcatgagatttttagaaattacacaagtgtttcgtttttaaacttacaaaaaaatccacctaaatgttcaccattttatacaccatttaatctgttgatatgaaagagtcatgtgcaacacatgacttttaatgattttttttccctctaaaatacaccttccttcaacctttttaccattggatttatgattaaaaaaagggagaaaatgaaagactctagctcgtgggcaatatagaagtctccattgttagagtaaaactcgtggaaactcttctacccaacttttttttttacgttgctaggttgtagaatacatgagtagaaattgcattgaaattaaacccaaaatatattgtggaatacattagtttagttatgcaatatggtcttgagttgctggttggagaaggatccctcccttcacacctctctcaaaacttactccaaaatggaacaaagactattaattgttaagggaaaaaggggaagaaatagattctaaaaacatgaaaatcaattctcttttcaaaactgaaaaaaaaattagcacaattaactgattcatttacacggatctcacaagtttcaaagatacatttgatatgtggtgattgatattatgattttgctaggacaaatatgtacaaaaatcgtgtttgatggtacaatttaagagacgtttgtttcatatatatttcttacattttcaagaatattattttcataaatataacaaagaatattattcttagatatttttaaaaaatatatgttttgttacattttaatattactgaaaatatttttttaaatttaaagtaatttaaataaaaaaaataaaattatatgtttatcaaataataaatttttacatttccatgaaaatatttttttcgcacccctcttaatgaaaatataaatgtaataaacaaacgctccctttgtaataattttagtacaatatcaatttgtaggatgactgggcgtgacaaaaggcttcggagggtgctaatgttcatgctgagttagtatgtggactggagggggtttagggttagggttataacaccaccaaacaaactctatacaaggagggttataacacaacaccaaacaaattctatacaatttttttagtgagatctgagaggtttgaggggaaaaaaagggaggaaaggtaagataagagatggagatatttatgtaaattcaaaagcgaaaatatatgaaaataaagtatattcaatactaatggaaggtttgttttaacaattgcctttaactaatagattagtctagtataaactattaggacattaaatcctaccaatacagatgaggttcataaatccttcttttttgtgtgtgttcttggtaaggatgcataacgtttgaattttaaaaattagccaggtccatttcataaaagcccatcggaacttttaaggtcaaatagctgaaaacaacatctcaacttcgactattgcttcctggacttttcagttgctttcagcactccttttttgtctttcagaatgatcaattcaaaatgtataattatattttgtaatgcacttccttttttacttttggaatgaccaatctcgaaggtaaaaaaaaaaaaaaaaacatcccagaaagagtgcagaaaataacttgagaagtgcaagaagcaacaatcctcccaaaaatggtgtggtaaatactacaatgtaactctatattcacaacaataatttgtagttctcgttaaaaaaaacaaacaaactagtttctagttgccttcatttcacataaatcaagtgacatattcaattttcgaaattttcacaaagggacacaaaaaaaaaaaaaaaactgttctatttctctcgctatctttcaattagtgatcatttttaacatgtaaccaaataatgcaaacataagtttaaatttaatatgcttttagtgtagaatactagaatgtgttaaaactatgggcaaccaattggtgatgcggtaaatgataagcaagacacatttttagtataaaaaagcctaccgttgttgttaccataaaaaaacagaagtaaagaagatagaaggaacaaaaatagttgaaaaataatgtactacattttattacttttttttaactacattatctgatgctaaattggcacgcaaatggttacaaaataacagcatttcactaataaaaacttatgttttcttccttttctcgttatatctctgaacgcttggtataaacaattaagcatcattttgctcttgcaatttgaatttagtttataaaatttaatttgcaaactaaaacaaaaagatgtatataatttatatgaacattttctgaatattttacgtttataatttaaatcattagttataatcaataagtcttcattcaaatggtattgaacttaatctttttaagtaatgtctcaatgtagttgaaagaaaaaattaatattttgtatcaataacatgttgaaaaaaatatttgttataaatatcataaatagtcatacatacacagcatagatgattgaataaataattatttgaccacttttaattatctttgacaataacaagtgatattaaaaataaaacgtgatttatttattatcatacatgatctaacctcgtaataaagtaagttttcttggtgcatcgtttattaacataatcaagattagtttgatgagtaaataatatatgcataaaatatttttatattattattttatcacaaattattatgtctgttaaatttattgacttatatattaataatttaaaaagttacatttaacaaaaattcgtattaattaatcgagtgtacgtaaataaaactcttaattaattatctattttgtggtcactcatgccaacatcctatatttctttggtctaggaatcgtttttcttttcaccacaatgtggattttacatgcactcaaataggacaaccattattattattttctgcaagactgcaaggtatcattcttcactaatgggaacactttttttagcagagttttaaatcttcgttcaccatattacaagtaactaacattttctactatacgctactctgtcaattgcactttcattatttgaaatcaaataattaatattctatgtgacaaggttgattagtttgatgagtaattaattattttatcctgaaaaaacataataattttattttatttttatatacacataaaaaacactttcaaaattaaaacataaaagaatggaatttgttatctaacttatgatagatgggattaaaaaaaaattgacaatttttatttaatttgtacttaatgtgagttaacttagtaagaatcatgcaaacatgtttcaaacatcaaatatagtcggctctataatatgaaactaaaagtttttttctataacacaaattttatgtatatttttctttgtatttaacaactatcgaaaataaaatttcagtttttttctatcaagtgcttatagacttatcataacacaaatattattaaaaaaattaaactacaaaagaaacaaaacttgtgaaacatagattggtcacctgtcgcatgaagcacctaaccaataataaatgtgggtatgaatcagattatttattcaattttatggaggactatgaaaaaaatgattaaacatacataaaagtaacaaagaaaatactattcacattctttatgcaaactttaggtactataacatttaagtaatgtttttgttctatgtaattttaacaacattctttcacttaactttacaatgcaattctttagaatgtgttatttaataattgtcacaatcctgtaactttatttattagcaaaaaacaaatgaaagttatcgttttaggatttttatagtggctcacaattaggcaattgttgttgattaccataacataaacattataaaaactacaatcatgtgaaacatagattatttgtcttgtgatgcaactcaccaataaaaaatttgaatatgaatagaaaatttatccatctatttatgcatgactataaaatatgattgaagctgctaaacaaaagtaacaaatactagattattcacgttctatctcctaactctggtattaaaacattttaacaatgctttttctctatatagttttgacaacatcctctcatttagtatgacattataactccttggaagattatttaaaaatgcatcactttatttataagcaaaaattaaatcaaaattataatttctaaaactatttatgggttcgcaattggctacttgggagctactcatgctgcacaatttttggaatttggtcacctaatgtgtcataataatatatggaagtctttatagaaaaattatttattttgcttaaaattaagttttatgtatattttccttttcatttaacaactatcaataataaaattccttttgctatcaaatgtttatgaacttaccatgaaacaaacattataaagaatcaaactacaaacttgtgaaacataaattacttgtcgtgtgatgtaactcaccaataataaaattgaatgtgaatcaaattatttagttttatattttatgaaggattatgaaaaagtattaaagttaaataaaagtaacaaaaaatagtttattcacacttgctaaaaatctgagtactaaaatattttaataatatttcaattctatgtagttttgataacattctcacatttaacatcacaatatagttataagattaattaaatcaaaattataatttcagactttctattagtaactcacaattgaccaattacttaccgcttatatcacataaagttttaaatttgaccaatattttggttacagattgaaaggtagaaggcgtcactttcaatcatggaagataagctaaagaaacatgtcacaagggtaatagacagtttagtccgaacgagttcaacttaaaacttagaaaatattttcacaataagtgtttttctaaaaaattaagtcttgtttatttcattgcaatttcgtgtatatataagcaactaacttttaattattctaaatacattattaactgcaattataaatactttaattcctaatagtacaaatgaacaaatatcaagactatcaatcactaaactaaaaaaaaaagtaaaaaataaaagaaatacaactttatttcacatctattaagattatactaataattaatattctatgtgatacgattgattagtttgatgagtaattaattattttatcttgaaaaatataataattttttatttattttataaacacatataaaaaaacactttcaaagttaaaacataaaagaataaaatttgttatatattttatgatataaaagaaaaatattattgaacaataaaatcaccgcgaatatttttataaaaacgccgagacacttcgtccatacacaacgttaagtattcccttatccataaattaatactaaaaaatcttcgtgcgtactgcgtgagtcccgttttaatttaacaataatatttcaacaacctctcctactgtctttggttagtcaatccaagttaagccagggtggtgtagtgtaagtaaccatggttggagaagataatcacaggaacagtcatagttacacgcgtgagacatttcacacgtgtgccgaatcctttttttttttttttttaagcaagaagcggcattaatgcttgaagatttaaaacttgactttctggtgaagaccgggtaattaatgaaagtcattctatcggacgggaaaaatgaagtattttaaaattaactaaacccacacttgtccttacctgcttcattgggcagcccgtaacgcagcatttcctgtgttgtgacgctgcccgaactgcccgattcttggctgagaaattacgagcattcggtctccagtacctgtgtgtttttccttctctctctctttctcactgacctctgatatttctatattttggtgctctgtttctttacgatcaggatccaacggtccaaaatgttcggggcttgtgctgcttgttttcccaggttttagagctccaaaccttcagatccaactcattcgtctccagatcttccttcctggtaagctctcaagccttcttcttcttcaattatcgctaattccacgttttctctttctgccgtgctttcttaacgatactttcacctttgtcttctcttctttcactatctaacgttgtaattgctgcttctcgaaagtttttagctgaaactcttcctctcaccacgagctcgctctctagttcgcgtttcacgttaaaagttaaaaccaaattattctactttctcttacgctttccgaatttgcttcgattttatgtgaattatgcttcccctcgtactccacctcgtttattttttcatgttttttttaaggattaattttttaattttttttaacaaaattgtttcatcattagtgactagtgtcatagtttttggtactttgggaaacaagatcagctactgtcatgattttgcagaagatctaaatatggtgatatcatttagttttatttttgtaataataattatttatttattatttacaggataacgttttcgggttcgagaaggcacttgtttgtttgtcgtacgaaatggagactaaacagagttcggtgatggttacgctcagttacggcgcgttgacgtgcgccgcggaagttctcgcgactttgctagcttctgctgtcgtcaaagccacgcttttggccccggtgagtcactctctctgccttcgtccctccgaaacctaatttctttgaagtctaaaaagaaaagtctaaaaagctagagtaaggtctaaaacttttacaagatctaacgttatctatatatcttttgaaagcaatttgtgttatcgctcgagttcatgtttttatggtctaaagcaattatgggaagttttttttggtctttgtcaatatgcgcttattctacatgctaatatgcgcgtgttggatgatgaatcacctcaccgagtcttgggatttttttttttgggggtaagttatgcgatgtaaccttatccttgcccatactaggccccggcttccgtgcgccggtgatttttaagtaactttttgagtttggcgtttgctaacgtatgcgctttttattttcaccttttagcttttatcttcaccaggcaaagtgaaaaaataaaataacccacaaaaaaaaacccttaacaagagttggtgttgccgttgttcttttgtttgtttcctcttgcggaactgggtggaagatatgaaatgcggttgagggattagtttagttccgaatttttaccaggtggggcccggttcagaataaaatatctttttgccatgtctgagggtgtaaaagtcaaaagtcaaggaagcggattcgtatggattattcgcttggatatgccgttgagcgtaaagcacgcttcacgaacacgtgtcgcttttgtgttgctgcttcctggcattttgggtgggaaaaaaggtagaatcttatacgatgggacataatcgtagtatccactgtcttaactgtaaacagtgtcagtcacttatgtttatgtagcgcattataatattataaaaaaattagtaggaggaatatttagtattgtcgtatttaacatgcattttacaagtctataaagtatgaatatatatatatatatatatatatatatatatatggcagtatttaatagtagtacttacattttcctttctttatatgtataattaataattacaaaagaatctgtttgttttcaatatgttttaagtacaaaaaaaatattgacgtatgaaataatgtgtgaacgtattactactgtctaattcgttatgatcaagaaaggttgttattattatcagtacttgaacggtttaaccggtacaaaactgtcgtacagggattatcatttatattctgaattaaaataaagttaataaacaataacgtgtttttattttgtttattcagaaataataaatgtcaaattattagtaatagatatcagtagtgatgcagtaaaaaaaaagatatcggtactgatagagcatatcaatttttttttatttatatttttagtaccaaaagtctgaaaggtgttgatggatttatcattggatttatatatcactaatttcaattaatttgaattaaaagtgttattacgtagatattgagtaccaaaagctttttattcttgagggaaaaagtgaaattcgttttgtttatatattttgatttagtaaacctttcaaagtaatagcttgatgcaatttgtgggggagtttaattttattttttttagcatcatggtgttaaataaattgaatggctttcaccaaacaaaatataacaatattgtttaaggcatatatatatcgtaaaataaaggagagaaaagtaacgcactaacgcaatgtataacatgataattaatttgaggttggtggatttgtatgtccctaacttttctaagaaacaataagtttggttcatttgtttggcttttatttgaattttcaactatataaaaggatttcaaatctaaaatgagatacatttgtagtatatgttaagatgaagatttgcatttcattaatttgatggcacagaggatgtcattattctttgaagaggggtagtatcgattttgaattctgactttttaatctcggactcttgatattttaaaatcaaattaattcaaataaattaaggtgaactcataaagggttaaaactcgtgacaaaattcaaactcgcgacttttgtgaaggagttatcaaactcctcacttagatttgaattctgaatcttattaacaataatacacacaatttgagaaaaataatctgcaactcaatcagtcaatcgtgaccaaagaaatacacctaaatgtcttccttttttaattacttaattagaattgaacatttttttggcttatctatgtgtcaatttggatgcttcggctattattatctccttggttcatttgtcttaacaaaatggatgcaggatctctaccggctgctattgaccaacacgcctacaaccaaaggagagagcaaaactcagagtcaaggcaagcaacgtgatgcagagggagaagacggtaacgatgatgaaggtgacgatgatgacgatggagatggtggatttggagagggtgaagaggagttgtcatctgaagatggaggtggatatggcaacaattccaacaacaagagcaactcaaagaaggcacccgaaggtggcgcaggtggagcagaagagaatggggaagaggatgaagatgaagatggcgacgatcaagatgatgaggatgaggatgatgacgatgacgatgacgaagaagatgaggtaggtgaagaagaggatgaagatggtgctgaggacgaggagaatgaagaggatgaggaagaggaggacgaggaagcattgcagcccccaaagaaaagaaagaagtgaatttagtttagtcaagcctcccgtttgtattgttgtgtacgaatttggcttctaacttgcatgtttttacttttttgggtactaaacttccatgttcttatttagtttataaggaggcttatgtaggacatgttttaattgatatctatggtaccattgcgtaattagaatgctacattattgagcagtcaatgctaaatttaagagaggaaaactatgatcttggttttgacttgagcctactccctctcccttgattgactctattgatagtaagaggtcgtatagtatgtctagaatgcaagtatcctttatctctagctattggcagtacttgctattcttgaaatttctagcttaactcattgcttgggcctttggggatccatttttatgagcttgcggagagctctctatttagcagacactagtggattattcgggcctgactgctaactcttctaaattaagtgggcgatatggttcacccacccgtactgataatctaatgtcaaaatctccaacaaattaggtaggatattataagagtttaatgcctatctatttacactgtaaaataattttgtattattatttaataataaattattatttaaattattttaaaaattaataaatttatcataaaagaataattatgattgaatgaatttataaattttgtataattctttttctctattataattgttaccttactgtcttgtttacaagtcaacgggttactatagtttggactttttggcttaaaataggatggaaccaaaattgcatatatacttactattattaaatattttttcccatattatgtataatttttttgctgaatatatatatatatatattatgtaattattagtattaatatttaatactatttttgttaaattaaaaatttaacaattataaatataaatacataaggaggataattaaaaatatatgatattaatattgaatatcaaatttaaatattttagtcactaaaattgatatatttatatttatgtaaaagtcacacacatttgaaaatgtatttatatcatcgttcaacacgtaaatcaattaacatataggtatttcaattgaaaccatcaattagcaaaactgatcattttatacctatattttacccataaaacttgaaagaccatggttaattttgaaaattcattcttcattaattgaatgtttaatgataagtagtaaaatgaaatgctttcgaatataacaaagtgaaataaatttccactttattatctatatatatatatagatagatatattgttttatgcgacattctctaagaaaagaaagaaaaatatcaatgaatgtaaaaattgtaacaatttcacttccatccatttctccaagcttctcagttttgtgaccagaggcatattcaaaaaaaattgttagtggaaataataaatagtttataatattatcacacaaaaaaatattaccaattatcacaaaatatgtaatatcgtgataaaaatctaaaatatttatgcttttataattataataatattttatgcgttttcatattttgaaagtattttataaatttttattgtcaacactgtaaaaattaaagggataacgaagtaaaattggtataattttttccttatattttcttacattcactttaaaatattcatcttactaagataatatctatttttctataaggcatttttctattacacatatacaaataaaaaatcttgtgggaactataatctggattagtcgatgttagttattaatctttattctctttaattttgatatgtttattttttttatatgtgcctttgcttttatatcttgagaatattaatttttaaattgtttttaatttaacagaattaaatttttaaatgttttatttataaatataatgtttttaaaacgagttagaaataattaatttaatttacttaataaaataaaattatttttgaaatgtgaataagatataattcatattacaaccagtcaattatacttgacaaaaaaaaagttatataaaagttttcataaatctattttgagtgagaaatggttttgttgggtacttggtattttggtagaaaaacaaaccgtggaagcaacccaacagccaatggaaaatttagttgtttagtatatgttatactgaaccggtcaatggtcaaccttaagtccttcttcttaactctttatttctttctttcaagtttcatgtcttttcctcatttcattcttctaactttctctccgtttacttcacttcatgacggattcttctcctcttatccctccctcaccagtcacagtcacggagatcgacctcgaagagggaccctccgaacaaattcaatgccggatttgtcttgaaactgatggtaatttttctttaatctcatgttttttttcgctttcaggttagggctaggttagatcattcattttgtttgactagaaatggacaagtcaacttcaagttcatattattgggatttgagcttaaataactttaatcgagcaattgtgttattgttcttgttagttcctgttttaacttatttgttatcagagtggcgtttctggcagttatgtatttactgcctgcaaatatgttgaagcttaacatttagatgtattttcatgttttgttcctctcaggtagaaatttcatagctccttgtaagtgcaaaggtacgtcaaagtacgtacatagagagtgtttagatcattggcgagccgttaaggtaaggatgctctctccctttaaaattctattcaaatttcaacactgtgtagtgtgttgttctatagccatatcaagaaatattctatgtccagtgagcattgtgtaacaactatgagatttttaagttataaatttgcttgctagagggtgacaacttctatgtactatctctgactcaagactgtttttggtggtctgtgtactttttgttcagctgatcaattaagcattgtgcatgttaagttgtcctgtgcttatcaagtgaaaactcttgttattgtaagaaatgaaaactataaatctggactataagattatatttgaatgatcaagattaaaagatggacacacatgccttttttaattggtcatgtgatatcttgaccatccatgcatgatttggatttatagttctgattttaaataataattaaagatttctcacttgatacgccttatagacactcatccacatgcaagcatatcactgacaatctataggtatataatatataagcacttgcttcctgaattttatcactaaaatttgtatgtgaagaagaagaatgttgctctttccagtgcttgacccaatataaatgtaaattactcaatgttcttgcaggaagggtttgcatttgcccactgcactacttgcaaggctccataccatttgcgtgttcatggtgcttatagacaatggcgtactttcaaatttcggttttttgtaaccagagacattttgtttatatttctggctgttcagcttgtaggtgaattgttttgattctcctagccatatagatgcttattcatatataattaatgaattccatgtaatgttctaattctacatggcaacaccttatttcttttgtctgcaggtcattgcttcactagcctatttggtttaccaaatagatggttacgagcagtattggcttcgtcttgtttggggttttggtagtgagctgagcttttactatatatgtggtaaattgctatggacttgagcagtagtcatcaaaatgcttatagcaagtattactgttactatttttttttttgttgggtggtagtggtggtaaattttggtattgtttaatttcttttattcgcagttgttttatccatacataggatgatgctggctctgttgttgatttcattttggttttgtcaaatgtaggagcactggtgtttcttgtgttgcttggcctgtctgggtgctttattacttgttctgatccaagaattcgcagtgatttgggtcagccttgtcgagaaatatgtctttgttgctgtcaacctaggtaatagctctgcttttaaatattcatgagcctttgacactgttaaaacatacaagtatactcataaatcttaacaacttcttgaatcgtcatatatttactttttgcttttttaaaatacattttatgatccagaaactatgcttggataatttctattatattggagaccctaatttgcactataaggaatacttgtgaacttcagctttttaaaaaacataaaaatgtagctcttatttaatacatccttggacatgctaaatatagaaagaatgatgtttcatggtatatttgaattttgaagtatatgtcagtagaaagtctgtgatccacaatggtagtgactaaggttggtattgtttgttttcattgcagagtttgtgctgaccgtcatttgcatggtactccttatatgtatggtactccttatatgtcgagtgattgcaatgcatgctgtgataattgtggaactgaatgttgtggttgcacttgcatgagaggttctgaggacgaagcagggctaccattattattcattatggctttgatttttctggtactctttgctgtacttgggatattttacagtgtattagtggctacaatgataggacaacggatatggcagcgtcattatcacatacttaccaaaaggatgctaacaaaggtgcccgtgccttactttattgtcttttgcacattcggtacagtgcagttaaccttcaattattgtttcactgcagctgctgagtcaacttaatgccttttttatttgtgcaactagcccatttagtgatttccttagtctactaaggaacttatatagaaattgctgccagatgtaatgagaaggttttctgtttgtttggcctttaaatccaagataatatatatctgctaatattttattattatgggaggaaaaggctatatcctctttctttcttcttctttagttgagtcatttagactgtatagcgttagagtattattaactgaaagtattgttttctgatggttcatgagaaatttacttttgttgacttgatgaaactcaggagcccaatgcagtgactggtgttaagggcacagtagtgttgcaattaagtcatggccctaagatatgggagggatattcaagaaaagggaaaagtgggacacgtaaagttgtagggagagatgccattatgctgagtgaaaattgggtggggcccgaagcagtagaagatgggaggtggttatgaagagtgcaggatcgtagctgagggaagggtagagcaatttggtttatcagccttaggcttgggcaggaagtttcatccatcttctcgtgatcttcatagccctgttttgattaacttcttaataaacacttataaaagaagaaaataagaaagtgaaatgacataatgaattaagcttttttaagttaaaatcaacttttggataggttaaatgtgacagtttctatagaagtttaagtgtataagttgattttaacttataaaagtttacttcatcttcttattctcttctactttaaatgcttactaagaaatttatccaaacatgaccctattttttctctcttcttgaatattctgcttaatttcatttttaactgatatactttgtgtttatcaatttgagttcaatataatctcctctatatcactttttttttgggtttgtattaagcttatactgaatttcatggactcaaaatcatcttgcagtctaatattcaaactgtttggggcatctttttccctccactgtgggtagtgtaaatctggcacactgaaacagtgatttttaatattgatattcccatgtatgaagttaattgcatacttgataggttattaaactgtactcttgaatattcaaccatcatcttgagttcttgattatgaaactgttttgtttatcataggagtatgtcgttgagaacattgatggagagatagcagggcctaattggactcctccacccctcccccaggagcatgtacagcagctgaaaacattgggcctcctatgagtttgaaggagtcatctacctgctgaggagaatgacagtagcggtaaagtgacaccttgcttcgtagtttggtccttgtcagggagatatgcagttaactgataaaattatgagtcatttaagtgactcatctcacttaggtttgacttgtataattgttctagattgtggaaatttgtgaatttctgttgtgtctgcaaatttaaagaaatggaagggaaaattctaagaatatatctaattacaaatatacagtccaggatcttgatatgttttatattagcattaaatcaaccttgctatgtacggattttctctcaaaactttagtcatttactttttattattttattttgctacaaaattttaaattgatttatcatttgatatagtatgttattattaatcctaattgctaacatcctaacatttataattattttagagtttaaatatacttttaggtttttaaaatatagtctcttcatttttttagacttttatcaggttgtttgtaggaaaaaaagtaaatgattgttacattttttaaccagtagaaatgaaaaatatttaaatataaattaattaattctgagaacatgttttcaaatattcaaaacatttttaagccatttttaatatataaaagtttaattaatgataacaatcaagttgaaaacattaattaagtttttggttcttactgttttttgctaattttacttttagtttctcaacaacatttatagtgcatttagtccctatatttgtagtctgttaatagttttagtctttactgtcatgcaaaaacatattaacttgtgatgtaaagttgatcttgttaatttagtgatttgttatatcattaagtaatttgatagagaatttacatataattttaaaatagttataaattctggaaattaacttcaggaatgtcactgaaacaatactttagaaaatcttcaagtaacattttaagaattattttttgaatttctatcatctgtgactaaaaaggtcaaatttactggagaagacgatggtagtgaaggagaagaatgtgtgggaaaattcaccaaaaaaaaaaaaagaatgtgtgggaaagaataaatgagagaagaaatgttagtagacaaagaaaagacaggagaggaaagtaatagggaaagagggaggatgtgtttatgaaggagaagtgagagggaagcagggagggtatttgggtattttaaaatttacaaaataatatgtgtgtagagaaaaaggaatgcaaaaagatagggcttcagtaaatttttagctcatagaaacaaattttttatgatgatttttttaaaaccaaactttataaatttagtgactgtacaaccaaactttttttttttttaggagaacctcctgcagctctaaaatgaaagccagaacatctaatgatgtgtttcgaaacttgtttcaccggcatcgaatgaaccgttttcacactttaatgcaaaaacatagaaggataggagttgtaggaatacaaacacgtactaatttcttgggcatattttgtttaagagcatgttttttattttgtttttaaaagtttaaataagaaatagtgaaaacagaataatgattttttttttactatttcttatataaacttttaaaaatagaaaataaaattaagatgatattttgatagttaaaaaaaaaaacttttttcaaatcaaacaattatttttctttgccgtctgtcttccttctactctccaatcataggccctacgactccttgcttctcaagctgttgctcgttggtgttggttacatgtcttctgtggcaattgccacgtcaccagtttgagaaagttaaagatttaggtctgtttaaataatctttgtcataaacactttagaaaaaggaaaataataatgaaaggcgaataccaaaaaaaagtgcgacgaaggcattgtacaattgattttatttaacgagtttacaataattttctacaatttttttggggtcaaatttttttctcttttctccttcctaaattgtaaaatttgttatacaaaatttatgttcattgaatactatccatgtgaaagttcccaacaatcagcgagttgatcatacccttctttgaaccgtacgagcacgtcctctgtcatcctcccaccgcacttacggctctataccccaacccaacgtgctctggccccggtcctccctttctattcctcatccatatttaacatataaaattgaataatcagagccgaaatgggatgttgacccagaaggaatggatagcgttgattaatgattttttacttatcatatcacaatagaattgaatggccacaactttctggcgttgcaggtgatcctgagcgagataagggaaaagagaaaaggctgaatcatgttttcttttttgctcaattttcacaataataattcttaaaaagaaaagcaaaaagtacataatatcttgttaacaagtattttaaggagatgttagaattttaaaaatatttaaaggaagaatataagattgagtatattaagaattttaaaacttatatactttatttagtactatatgctatatttaaactcttggtaagcgtagcaagaaactgagaatactcgatggaatatgctaataacttgaaggtatctaaaaagatgaagtaacttttgtgaattaccaaacttgaagccttgaacggatgaagtgatgaaggaaaagaaaggacaaagggaccactaaggtgcgcttttcgcgtctgaaaatagtaataattgatcgaaaagagacttgggcatgtcacatgtgcatgttggataccataagctgagctgagatcaagtgaccatgttctgtctctacgcacatacatacaccgttacattacatggcccctgccccacttttcaacttttcatcatattccacattcaatgggcgcccccactaacctaaataaaataccatcaattctcaaaacaagccatgataataaggcaaatactactgggtgttatcaagaaattggtgaacaaagatttttattgagatgcttaaaattatgttatggatgattttatttaaaatttataatattttaaaaaaaattaactaatattctaaagatattttttttagcgaaacagctagtaataaataataataataataataatatagaaacaaggtgccccacccacaaaaagtgtattgagaaaacagacaaaccgaacccaccggctgcaagcaacagcaacaacaacaacaacaaattcacctcattcttatccaaaactgttagttgagacttcctataaattgcttttgtcaagcatagagcgaaaagcaaagagcaaatcaacaaccttttaagcacagtgagagaggtatacgtacgaggatgtctgacattgctatgttggtggcggaggagtatgagaggagggtcaagagtttaagaaaggccggtggtggtggaaccggagtgggggaatttgacatggtttcttgtgtttcggtgatggtgtccaggctcaaggaaaagaagcagcttgtgcaatgggttttggagcccaagacccaagttgctatggctgcttccaacagcttcttctctgcttaaacaactcattcatcaactcctctggactctgatgtggttggtgtttgattgttgcaacgaattgttatctagttttttcatattctaattttcatgaaatattgtacatagctatgttttggattcaaatcaaaggcaaagcataattgtgtttagagagtttttccggccacaatattcgtgccctcttcccctccgctttctctgtttccttggacgttaaatttagaaaacaacatcattgctaagtatttatctgttttgattatatttattggaaaacttgagtatagtattttcttccatcggtgtgtttggattaaatccaatttttcttttcaccataattaatttcaaattccaagctgaaagtcaaagaataaagagttgccaccatttttaaaacttttcaccataattttgtggggctgaatcaattctattaactgttcaaacacactattagtaaaatttctcaatcaaatcaatttttttcgtgtacgaagatatcgaactcaattcattctaatcaacctaataatagtgttatgaaaaagagttatgtttgtatttttctatttttataaataaataaatataaaagtatgccctgttttttttttttttttttttatacttgattttgcaggatttgttgttttcatttcggtgggcgaccctagaccctagtccaattgaggagattttgtttttatttttattttttgtcgacgattggaacataaacttgcaaagaagtgaaggcggtttaactttcacttgcacgcatttcagcaagtttggcgttggcgacaactaatagtctaactattccttaatgtgggtaacaaacaatcaaacatatgatgtaatctcctaaaatataggattttaaaatatctctcttggtaaaagtatacaaaaagattacataaacgatggtggtatataactcgttaaatatctctcttagaaaaagagttctgtttatatataaagattaccaataatgaatatataaagaaattcgtaaagagtaggacaaatcaagtacaacagaaaaagagttctgtttaaataatctttttgtactatgaaccacactgtctgaatgggttgctaaggcttgatgtattggatcttggaaatgcatcacgcgaggtttccatgtttgatccagcttgtaaggggaattccttaggacgtttacgtgggtattcaagctagcctatgatgtttagcttgttttgtttcggcccatgattttccaccaccttgtttttggcatgttgggcccttcttgcataaaaataaaataaagttcgttaggcaccccccaacttcacctcttcattttcctcaaacgtcttcacactttttcttctaagagcattgttctttcttgttttccactgacttctccacgtgaattttcgcaccttcattgctttttctctggaggtgttctgtttattatttattttttatgttgagtagatttgacgaaaactagtttccgctagatcaagatacacaatgaaaattggttttccgcaaagatatttttgtaataaaaaaataggtagagagtggaaaaatcaaatagaggtatgggaatatcacatgcctttgtttcacacagcgaaaaatgaatacatgaaaacccaagatgcgggattacaaataaaaaaaacaaaaacaactcgtagttatattatataatataattttaatttttttagaacaattattttatgaagttgaaagttcaatcagaagaaaactataatataataatataatcataaattaaaatgaaaacttataatttgatataatctcctgtttcatgttgttttagaatttttaaattaattttcgctatcttgggctataattttattggagtgatgatgaataattgttttgtatctttctacgttgtcttgtgctggaccttttttattttctttttatatgtgatatttttaagttaaggacattgctattgaccgctcctcattgctatttaaacctccaaaccaaagagaaaaagctaaaatattcttttggcatttaattaaaaatacctggtcagaaacataattgtgtttattacatttagaggagtactagcaattcattcataaactttttctaattgattgaaatgtattgaaaactacacaataataaattttcaccaatgaaagaaaatgtgttcaaaaaaacttgtctaacatttctcttcaagatttaatacaacaaaaataaaaatttgttgtgttatttttgttttaaaaaacttagccaaaacttattttcaattggtcaaaatttaaagcgacttccaaaattttccgatttcaaacaaaatatatagactaaaaaggaacaatgaaagttacaaatttaaatttaacccacacgttaatattgttattgactttcagataaattcaatccaattttaatcctgtttactctgcgtatacaatcttattcgttttacacttattacattaaattcattgataatgtaaatttaatctttagtgatagatttcaaattgagatcttagactactttttggtagatcccataatatcaaataggattaaagatcttttaaaatctcttctttcatatttttctttaatgatagatctcattttgagatcttaaggagagagaaaaagaaagaaaaattattctttttttaataatgtgcaaatcttaagagatcttttataagaactcatcttttatattggagatctcttcaactcctttattagaagatctaatgaagataagatcttaagctcaaaatctttatttaagatcttgcactaaagatgttataccttaaaaaaatgaattcattcatcttgtaaaattactagcatggagatatacttttacaagaaattcatgtcaagacaacataaaaagtaaaaccaacataacataggtgttacctaacacgtgggtaccttcattaacactacaacaacaaattgacagtttggtgatacactagaacttttatttttcgaaaataattgtatgagagcgtgcaatataatttttccgtttgtggctggacacttaaattaaagggatgggcaagcagttacttttgggaagggagggctcacaattcagttcataacaatgtccaattggccatatatgctcactgctcatctcaatcgaaacagaacgaaaaagatggccgccaaatggtgcatgcattgaatgatttgccgcaaaagttgcttataatataaccttgcatggaatataagcattgaactgtctctttcaaccaagaaaggcacacagttaaatccgtataactatatgagtgatatgaaattatgaatagtggaaaaacattgtcacttgttaatcaatgaccatgcgcatgcatgcattattaactcgactgaacattttaacgataatttgctgttgtcgttcttcaaccaacgcctaatggggctaataataatagggaacccacagacaaagtttgaaaataaacaattataaagatcatagtttgctagcaatttagctcaccacctccccctcaaacttttttttgatcgaagaatttccattcataagccgagacgaaacaagagcaaagaagaaattattatgtctacaaaattctgactaatttctatgtgataaataattatatatatttttaatttataaaaaagttaataatatatcatcatcacatgaagattggtagaaattagatgagctcatactctctataataatttttttttacataaaaggcatttggaatgcactttgcaagataaaatacagaacaataaccattaattatgatatttattaggatatttagtagttaaaatcttaacaacttcataatttattttttatgtatatttgtaaattataaaaaaaattaatagtaaattccaaatcaacatatttgcctgacacactttatcagagtctgcttggtgagatctatatcgttaaaagaaataaagagaaaaaaccttggtggtccaggcaatttgaacgcatataaaagcagtacaagtgtccctttgcccccttttgtagttagagtttataattgtatgcagctatgcatgtccttggccctactatattcaatttgctcagctacctctgcttcgcgtcgcgtggcagatttatgttcttgaaggatatttcagtgtaaaagttcccgataattattatatgaaaataaatgtgcttataaatgtaggtgataaaaatgtaaaagagtctaatatcattaaataagaatagttgtacataaacattcttttattttaaatatctgatttatttttttatttttttctatttttctctttttaatacgtgataaattttattatatttatgttttttccctctctccttaattgttaaatagcatattagatacattcaataattggtttcattatttttttaattgattaatgttaatttattaatttttattagttattgaagagaatttaaatccatgacatctttctccttcattcttttttcactgtaaaatcaatcttataattaatttcattagtttgtagcatttcgtgaaagttacttcaattgtgcttggcaatacttttacgatagctgctaaattatttgaccatcttaaaagtttatctatccataataggcctttgagtttattaattttaatatatcttgtggcattttggtagtgtcttttaggttttaatatattttcaatccttataaaacacgatgcatgtttttcatattagtctctgtaaatttcaacaagcacttttagttcttacaatttcctcccattttttacagtgaaatttcctccgttaacataatcctcgctgttgtatttaaaaaaagtttatactttagtatttataaaattatcattttagtccctaaaaactagaggtaagaaaaaatttaaaagactaaaatgaaaaaaccacaattttatagggtctaaaagtgctcacaatatttttcacgtcaacaacaaagtctgactaggacaatcttttaattttaacgggaaaaatgtaaggactaaaagtgtttgcaaaattttataggaactaaaataaataaaaaatactattttaaaaattacgcgtaatttttttttaaaatggtatttaaaagtaaattaaaaaatattttatagtaattttcagttttcaaattttttaaataaaatgaattggtttattttggtacaccaagcttgctagctagctagaagacatggggcttagtagtggtgccttggcttcagcgtggaagggcgtctctatcaatagaaatacactattagtaatgacattgtttttttttttttttttttgtgagcttaagtgataactttgtcgatcttattgagccattaattgtcttttatgttgaatgcaaatgcattagtgttgacatcctttgcaaaattgttgtttgatcaacgctaaaatagccactggcgacaggttttgatgattatagtagacttagttgacgttaatatgcgtttttctggtagtttctacttgcacacacgcaatatatgtaaataagttctttttgagttgttaatgttaagcttataaattttaggtttaattcatttaaataattaagttcgattttaagtttaaatttatttaattaattaaataaataagtttgatgaaacattcaagcaatccaaatttaaataatttacaaatagatagtttcatttatattggtagtcttaatcatgaagggattctactgaaaacttcataatctactgtgccatttttcgatgactaaaatagaattttgatttcttatctatattttacgttttagtttattcctttaagtctaaaattttcacttttgtctctcaaagaacaaattgactattttattagtttattatattaatttgataatacttgacaaactataaaatatgtcacattagtcaaattaatatcgttattgtcaaaaattggaaaaaaaaaaactaatttgttctaataaacacaataaaaaatttagtgaatttttttaaacttaaaaagattcaattaaaacctaaatataaataaagatcaaaattatattttaacatatttaaaaataattaccatggtatttttttagagtaaattacatagatcttttctgatgttaaagaaaattatacatatcttttctccttcttaaaaatctacacatcttatttgaggtttaaggaaattacatatcttttccttgagatttaagaaaattatacacgtctttcttctatttttaaaatctacacaaacttcataaagtaacaagtgatgtgcgttgataattttaattaaaaaaagctaaaatattttatcgtcttcataaatatagaaatgttcagaatatgtaattgcaaatttttttatcaatttttcgtcctcgcaaaatttaaatctattattttttggttcagaattggggcttggatatccaaacccacatgtatattgtgtatgttgttgttgaaagtgttaggatattaacttttcttcatttataaatttgaatttaactctacaccaaaaacaaacatttaaattttgtgaatacgaaaaataaataacttttcttttttgcagtgataaatttctaacatttttatatttataagaatgaaaaacatattttagttttttaatcaaaattattaacgtacataatttattactatcaaatgttttaagcaatatttaaaaaatttgtataaattttaaaaataaaagagacatctttaatttccgtattcttcttgagagagatatataaattagagatgtatgtataatttacttaaccaagatatgtgtaatttttttatttattttttatttactaagatctactatgcctataagctagatgatgtcatgtgctcatgcgtattgacagtgaaaaagagataagctccaatagaatttaccttcaattggcgttgcccattttccaaattcaaatcagaagactaatatatttatttaatacaattttttaatgcttgacttgattcttttttcaaaatatacttcgcagtcaaacttagctttaaatatgtgagtagacttaactttaaataggttagttagcctcatccttcaaatagattaataagtatataacttcttaaagaaagttagttgtaaaaaaattattataaaatttttcatttacgtaaaaagtggtctaaaattgtttaaattcaaaattaattctaaacccatgattctaaattatctaatacgaatccaaactctaagacgtaaaattttcttgttggccaccatataaagttcaaaaaaagagtggagctccataatgcaaggtttgaatttgctacacatgtgaaatagtagcaaatacagggagaaggaaaatgagtgtggtcctgcgtggaaaattaggagataatgataagctattatgcattaaaagcaacactgacagtcaacaagtcgaacactaccactataattctataactatttttgtccaagttgtgggaagctatactcactcaatcaactttctttctcaaatttgcaggaactgtttgtttctccttaattatgcaaaaattctagaagagtggtgctatgtaaacctgggaggttaaaagttaaaatgagtgcagacagctaattcctgtgctcttgcatgtgactagctctgccttgtggggacttaaaaggttgctctgtctgacctctgagattgtcgcaaccaataatatgaggagtcacttgtatatgcatgaacaaatcatttaaccttttcacctacccatttattattgtattaacgagggtcttcgtagaatttcaatgtctatctactagtactactacttgtacagttgtagttgaacaagtcacctatttgagaaacaaacttgggttttactccatggcaatatgttgacatacataacttttaaggggttgattgatcgtggagcaagataaagtttcgcatctgaagagattattaagttgagtccttactcctttctttgggataagataaatataaatttttctctaaatattgtttgaggccaaaagctttagcaactttccttgtcttgaaaactgagacattattccctctccttaaactttcgataaaagaaaaaaagaaatagcctgctgaaatacatctccattttgggatatttcgatgtggattccgaagcatcaaactaaaatcgtttccaaattttgccaaaccgaaattcaaagagtaaaaaacaaggtattgtgcagcatatatagtagggaaagtagttagaatctttcttttactatatataatcttgaatataaaagactaatagatacaaaaatctaaggatacatcagtatctggaactagatcagagatatctgcgcaaagtgctaccaccccttaatgcagatagcaaaaagataagctggtcatcattcccatcatattctacctgattttgaagcaggttgtagttggccacaacatcatctgggagcaacttgttcctgcaaagtgggcaagtagcacagtattgctgcaaccactggtccaagcaatccttgtgaaatgtgtgtctgcaattgaggttcctcactttctccccttcctggaattcagataagcacactctgcaatctatgtgttctgccttcaattttctagtgaactgaatagtggggttcttctcttcgatgaaattgaggtattgggtggtggaaattggacgtgtatctgactttaggtactgaatgatgaagataagttgtattagcatgtatgttaatagaactattgtcttgacatagagctgatacaagaactcacacacagacgtcatggcttggcttctactacttctagctaaatgctaaatgaattcttcaatgcacgcacgacaaattttttttccctttgtaaaacaatgaatgcccccaggcacgcaattatttcatttataacttataaatagaggcgtgtcgtctagttttttgtacatacccgccacatgtattttttatgaagtaaatataagtacagataaacttagaaatatttgtagaaaaaaataaggaaaaaaaattctgaaagctagattgcttaagtaaattattatttttcatattagtttcttcaaaattaattttaatttatgcataaattaattttaatttataggaaagttttacattttttcttctaattttcttcttaacaagtgcttttgtagttcatacaaacataccttagttatttaaattgagtaagattattattcataataaatttctccctatatatttactacaactaatacctaggacttgtatttgagatcattaattaagttagagcaatttgtattaattaattcacatgcttgatgttattttttattagttgaaatgttttcacctttaaaattataaaactagataaaacttagatgcaattcattaaatgtttttggtattattttccaattagatttggagttttatccctataatccttatgataaattgcttacattgaatgtaagtataggttttcaagttttcactccaattctaattggaaaacaatactaaaaacattttaaaataattatttataagttttgttctactataaaatatattttattttattcttttgttttgaaaaatatacaaagaaaataataagagtttggaacacatttattatcagtataaaaagttaaatgaataaaaatattgttaacagtgtaacttttaaattaataattattataaaaaataataaatttatcatatgtatttaagtttttattgaacgataatatacaaattctttgcagtaatatagaggatttattatttattggtaacaaaaatattttttaaaatctcattttgtattcacaatttattttataaatgattaaaatgaaaataatgtttgtatatgggggaatatcaactaaattttttattttattcttttcccgttctctataaaaggaatgtatagataagataatgtacgtacttgtgttctttattagtagctttttcttctgttactcagttactgtttgttctgttatgtgcgactatataacttggtcccatgtcatcccaagtagggaagggacaactaccacggtttcggacaggcgtagctacatttccgcaaacatttatttgggtaattattatttgaacttaagaaagaacttccaggttatgtaattattgtttgtgcaactattttttggttatttgttgttttaaaaggaatgtctttacttttcttttgtataaaatgcaatgtaatttggcatacagaatctaatggaatatatagaatttggacagattaagttacaaataattattattatatatccctaaaaaaatattgttattattatatgaattcttttaataaaatacatagaatgtaatataaaatttgttttaatgaaacttcataaattaattgaaaatatttcagtccaatgtcactttatgaccaaacacatgttgtgggacgcactagttcaataaattcctacacgctacgatttggtgatataaattgaagtgtctagttgtcatctaacctgtattgcttctatttttccaaaaatatacattttagattcagtcctatgacaatgtttgtaaatactcagtccaattacttaaaatggattccgacaaaaaaaatgtagatacttactttagtaatatttatatgatcttaattattaaatagttttaaagaaaaagacagaaatgaaacttacacacaatattattatgtaaaatttaaatacgagatgatacatattcaatacaacaaccaatatatagcaatcaacatttaggcaaaaaaattattgaaatattaaaatattttaaaaaacaaataggccaataaactggcttaactgattttttaacccaattgggttatgttaattaaaagataaatctcatttcatacttcatatttaatgagtctcatatatgaattcattgtttaaaattaattttaatcaataataaaacatgttaagagggatattttagaaagtatagctaatacttttcgacaaagtcaaaggcatttagctaaataaaaagtctaaagttttctctcaacctcaagctagatccttcgtttggaaatgtacaaagactttattaaaaactaaaaataggtgactcaaataaactgaatttgtttattttggtaaactaaactttgttattttctccgttctgtaataaaggtagtcttaattttttttttatacagaccaaaaaaaaactaatgataaaatatgaaagaaaatcacaattttataagaactaaaagtctttaaaaaaatttcacataaaaaacaaagttaatgactaggactatattgctaacgaaaacaatataaactaaattttacatgaacaaaaatgaaaaacatgttattttaaaaatatataaatgacttattttgatcatttattttattttttattcagtttaatcttttatctttttaaaagttcaatttgatctttttttttattttttattcaatttaatcttttatcttttaaaaaatttattttaatcgtttattattatttttttcagtttaatcattcgagtcatttaaaattgacatagttaattatttaaaaataaacttattttgttaaaaatgaagtggaagagaaggaaaaaaaattaaataaaaaaacatcatttttaaatgattaatgatatcaatcttaaataaattgaagaagtaaataaaaagaaaataagatcaaattgaaccaaaaaattaaaataaaaaattaaataaattttttaaaaagataaatgattaaattgaacttaaaaaaataagataaaataacaaattaaactttataaaaataaaggatcaacttgaagaaaaaaaaagttaaaaaatcaaatatatcatttagctttaaaaattaagcgttacatttaaaaaaaaaaatcgtatttaaaagtaaattaaaaaataaaatgcatagatgtaatgtaaaatttgtttattgaaacttcataaattaattgacaatagttgagtcctatatatgtcactttataaccaaacacgttatgggacgcactagttcaataaactcctataaactacgatttggattggtgttatgaattgaagggtcaagttgtcatgtagcttctatttttccaaatacatacattttagattcagtcctatgacaatatctataaatactcagtccccatacttaaaatggatttcacccaaaaaaaaaatattgatacttattttaatatttggataagattttaatttttaatagctttaatgaaaaagacaaacataaaacttaaacaaaatattattatgtaaattttaaagaagagatcataatttttatttttatttttttcaatactagaacaaccaatatacacattcaactaggaaaaaaaatattaaaatattatctttttaaaaataaaatgaactatgccattgaactggctgaacgtatggttttcaacccaccacgttaaataaaactagaaaagaaaggattgaactaacactttcaccatacaattcatatttttatatggagtaatctatcctcgaatgatgaaattatactaatttaatttatacaagtcataaatggtaagtttattgatttttataaacttcaataacaaattatcttaaaagtcattttatcgattgtgtctaattggccaatcatgtttaaaattattgaaaaagtttatatatatgaaaacttaaagatgatgtttaaatgttgagagcaataaaagttataaaaacaattgatgtttaaaaaaagatttaagtgtttaaacattaaaaaaattgaaaagaataaaaataaaaaggttaatgtcttgaaaatatgaaaatgttgagcaataaaatatttaaaaaacgatttacttttaaaatatttaaaatgttaaagaatgaaagtttaaaaatgtgaaaaagtataaaaaaaaatgtcttgaaaagtttgaaaatgttgaaaacgaataaatttacaaaaaaaaaaaaagatttttaaaaagtttatgcgtaaaagtaattttaacaatattgcaaaagtttaaatatatgaaaattaaaagagtaatgtgaaaaatatggaaatgttgagagcagtcaaggttaaaaaatatgatgtttaaaaaatgatttgaatgtttaaaaatatttaaaaagttgaaaagactaaaaattaaaagagtaatttaaaaaaatattaaaatgttgagagcgataaaaatttaaaaaaataatgattaaaaataatttcaatatttaaaattttaaatataaaaagagagtaatgtcttgaaacatgtggaaatgttgaaagcaataaaagtttttaaaaagataatgtttaaaacgtaactaaatgtgtaaaaatattgttcaataaaattttaaaagttgaaaaggacaagagtaaaaatatgaaaagtaacaataaaataatgtcttgaaaattttgaaaatgttgaaaacgattaaaattacattattaagtttttaaaaaagattatgtgtaaaagtaatgtttaaaaatattgaaaaagttttttaaaaataaaattttaaatatataaaaaaaataagagtaatgtcagacaagatatgaaaatgttgagagcaatattttttttaaaaaaaaaagatgatgtctaaaaaattatttaaatgtgtaaaaataatgtttaaaaatatttaaaaagttaaaaagaataaaataaaaatgggaaaaagtaaaacaatgccctaaaaaatatgaatgttgaaaacgataacacttacaagataaagatttttttaaaatttatatatgtaaaagtaatgtttaagaatattgcaaaagttgaaaggactaaaagttttaaaaatatgaaaatgtcggatgcatcaaatgctaaaaaataatgatgtttccataaagatttaaatatgtaaacataatattaaaaaatattgagaaagttgaaaagaataaaagtttgaaaaatatgtaaatgttaaaaagcgatgactttaaaaaaaaatatttaaaagatgaaaattataaaagttttatcgaacagtagactgattccactgaaaaattaataaactaattaggtcatgaatgcataactcagaaagttgatctaacaattcaaaacaagtgatgagaactgcgaagcaatttaaatcggaaaaaaaaaaatcgacacaaataaaaattcatttacaagatctagatatgaatctatattatttaaccttttaatattaatgatttttttataagacataccagataattgatctttttagtaatttaaaactttacctgacttaatttcttgtagcttataatatttattactaaaatgtatcatatattaaaattaatgtaattatcatcaatttattcataattcaattatggtaaactgcaaataaatgtctccgttgattcaatagctactctaattattaaatgttggaccttctacagtcaaacactatcatacatgctaacctggcccttacggtatgcttggtggagcttctatggtcaacatacagcctccaagtgccaaccttcttccctgttaacaccacaggaaaggcataagggctgttgctgggttgtgaagttgaacgacatcctggttccacatttcatcctttggatatcaattagtttcatctaattgacaaagctcagagttgggggatgaaaaactgtcaaagttgctccaatcaaccaagcacaacatcaaacacaattttatatgctggggacgagaaagacactctgcctcagagtttccttcatccaatataatccaataattatttgactagccaagtatatacaatacaagtacattatcatcaaaaattttcactaccttgctcatgagaactcactgttcactcagtctcaaccaaatttgtttaaagcatttataatcttgagttgtgatactttcctttaacatcccagggaccagggagctagcctggcttccacatatttgccaagtcaaccccagtgagcctactgtttgctcaaaattaaataatttcaagattttgcttgtttcaaacagatcattttgattaacttttagttactgcatgtctcatatagaatgctgatgattaccatagtacaccattcctggcggttgaagtggtcggaaactaggaggtgctggggcttgttgtgtcatttttattggttgatgctgacctataggtgttggctgctgctgagttatttgcattgtctgatgtgtcaaaggcgccattggacccaccatatgtggtgggggtggccccggtggtaacggtgcgatgctaccataaccataagaagaaatgacccctcctgttgattgcaaataatgctgggaggatgaattacaaagcatttgatattgaccctgtgatgcagcagctggattctgcaaggtgggttgaggtaccaaaaccgaaggatatgaatgatttggtgtggcaattaactgttgtgaagtcataaaaacatttggatctgatataggtattgacttctcaggttttgacatggtctcagaagttagacaagcactttttgcctcttcagctgcaaatgttgagagaacagaactcatgattaactgagatgatgtagaagctgttagcttatctgcaacctcagctgcaattgctgcagctgacttcttagttgctgcttctgattttgtatttacatcagtagctgaagtcgttgaagttgaggctttatatgaagaatcttcatcatcaagtcgcttccgcatgtagctagcctcttctacttgtgcttgcgctacctacataccattaaagagatatgtcagcacaaaattcaaatttttagtatcattagcaataaaagcacgtcaaagttccataatgaaagcatactcaacaacatataaatgacctttaatggttaacaggaactaagttactttatatttgtgagatagtgcaacaaagttttttccatttctaaaccaagtttgttacattgaatgcctttgagggtttacaaaaagtatgcatacactctagttttggaaagggttaaatatttttgtccttataagttataaaatgtcatgttttttgttttaatccctataaaaattgtccatttttggtccctcatttatttgccctcatcaatcagtccctgggatgcactcaaactgggcaaaaaatttatagggactaagcccagaaatatgaaatttcatagggaccataagcatatttaatcctttcagagataacactgaattcccctattcccctctcaagtttgaatatgttccagacatatctaaaatcaactaaggaaggcatttgtataatatgttttttaagaggcaagggtttctctatgttatgtaaacctcagggaaggcgggtctaatttattctattaaatgttttacaactgtgaacactatatatgagcattttattgactttaccataataatcatccaattactatatgagtattttattgactttaccataataatcgtccaattacagataaacaaagaagagtcacataagagaggtaattaaatggtggaaaacctagatacacgacaaatatatcacattcacatctcataagaaactactcaaaataggacagtcttctgataaaaagaatcatgataatacatacctgaatctgagtgcgaacattctccagctcagattcctgatacataaaagcacaaacaattgcaagagggcatcaggacacaaaatatcatccagaaaccaaataactgcagaattcaaaatataaaatcttattgagcacatggacataatgacttgcctgctcatgcaaagcttcttttaagcgagtaacaagtgctgttctacttgcttcaactaatttgagattttcaatgcattctttcaaaatatgttcttcctccactagttccttggacaaaatttttcgcttagggtcctttactggaaaaaaaaaaaaaaaagtataagaatcctagcttccaaaactctggtgttaatttcattatattgatagcttaccaacagcgcatgcaatatcaacatttttttccatcttcctcacacgatgaacagctgacttgcatttactcatctctgcatcttcattggaatgttcattaagcaccgtatgaaaggctgagactattttttctgctgtaccaccaatggacaatttctggattacataaaattcatgacagttagttatgcaagaagaattacaaactagtttgaaggatgtaagaatctaaaagcatagaaatgtcggagtataaaatcggggagggaagaaccacaaggaccctcagtctcaccgttttaatggaacgagaatcctttttcacaattctaaccgaacgggaccgctttttgttgaattccaactgcggaggtgcttcttctccaagtattacatttttcaggctcttagcctgtgatccaaacactctcctttcctcccatatatcaacctaaagttaggtaagcaccaagttaaataagatcaaattgccaacattgaaatcaatatcatggtatgcaaatcatttctcaacatttatatgccatatctgaagtatcagccatgcatgaagaattatgtccacaccaacttcatatctaaagaataatttcaacggttgtattcacttgtactaacttcaaactctggaaaaagggcttaccagtctaaatactgcacgtttttcttgatcatcacctttctcaagaacatccttaagtgctgtgggaagaaccttccaaaactcagtcacaaattcatttcctttacgtttgctattttgcaggatatcattagcaagatacagaagggggactcgctgaaccttctccgaattgtgaaattgtttattccatgttcccactaccagctctgctttgcttcggtgaaatatacaccaatgtgataaagctattaaaaaaattaaggatcacagtatatggcatcaacaactaattcatgcactttaaacagtcaactaaatactaggcagaaaaagtaaaccacttttaaactaagacaaaatccatgccaaaatactaattcagaaactcacactccaagttacattggccaagccctaataagttcagcttacaactgtgagtgcaataagtttttgatgcatcaaacatctgacttagtgatagaaagataaataagttctccaaaagctagggctgccactgcacaagacaaatccttttcaagatggacattgttctgatcaatagtgggtgttactgcaggtcccaagtaatagaaagagagagagggagagagagagagagggaaaagtaaaatactaaaaaaaaaaaaaaatacatgcacgaagacaatgtatgccattaaaaagtttaagatccaattctttgtaggtctaaaagcatgacagactttctagaacctcccatagctgaagcaaaactgtaagcttaattaatataaaccaaagaagcaactatgaagaattacactcattgtaagaaattaaattaatatggccattaacttttttcatctccttggcatatggatcacatgaaacactgaaaaacatctgcattttaaataatactccatagcttttagcatgactttattacaacatgtgactttacaaataaaagctccctccaagacctatggttgcttagcaattctagtgctacttccacacttgacaagaatttgcccaatggtttttggcctatggtgtattttatttatcttcctactttgcttatcctaagaacaatattaactttcagaaatttcacgaaaacaaaattgggaagatgttcaagccattcaaacacgaaaaataagcataacatacaattctagggcaacaatacacgtataattcacagaaccagtcacaattcagtagttctttacttcttcccactttagaaatcacgtacaaactgaaaagattgacctagttcacaattagcgtaacacctgaagatataattgcatatttataaacgaatacagtaattccaattacagcaatgctatttattccgagaccattttccaaattaacacaccaaatatcacacaccttccagaatccagaattaattgaaacatatacataaacaccaccaaacctacccccccccccccccccaacatacatatcccaatttggtgaagcaaagcaataattatatcatatatacaaaaaaaaaaaaaaaaacatttactgagtaaacaaattaatcaacttattttcttggtaattttccaaaaaaaggatactttcaatgcactgctgggtgctgttgagcttggacagcttgtccgccagtatctgctcgctgaacacgctattcataccagccaacctgcgagagaaagcacatgagtgaaaccctagcaccctatacaaccaattgatgaaaaggaaatgcgagaaattctaagaaaactaaaaccctagaacctaatggaaacataaaggaagaacgagagaaggtagtttcgaagcaaaaaacatcatttaaatgaataattaagcaaaagaagagaatgaaggagggggaattgagataccaatgccgcggaatcggaaccggtggaaacgaccgcgttttggggaaaatgatgaaggtatatgaatgtgaatgagaaatagaatgaaggagagttacaaaagaagaagaaggaggagaagggaagcagttaaagttaaaggtttacgtttgcggggtttggtttgtccatttggcgcaaactctacgaattcgtctaaaagccgtacttgttcatatattacatacactgttctccttcgtggcacgctggaaaacaaaaaaaagtgtcttgtaatttttaatttttggtgaaactgtgggttgtaagttgtaactgtagtagtattttttagctccaatttttattttattttttaagctggaggaatgacatgaaatgctaattataaggaagaatggagattttctataattttcatgtcttggaaacttacaattcttattgtatatcaatttcctacatttgctagtattttcgatctaattttcagcctaaataaatgcttcgtttatcgatgccaaatttgtttgattatactatagtataatcagggttttatttttaggtgattaactcttcaaacatttatggatctaatcccatccatggtataatttggacaaattgggatctttgttatttattatttcatttgactttattgaataaaaaataataaactcacatattttatccactttaagttcatctctaaatcctaaactttaaacatgcacatgcaaaacattcatgtttatggtgtataagtatcattactcttcattcattatgttttctattatgtatcattactcttcattcattatattttctattataacttatttgttttagacaatggaaatagtgtttggtacattagatttataaaaaaaaaaatattgaattagtggatctcattcttttcacccatgaaacatggtattttttttcaacttttatttatttttttttgttgttgtcaaccaactgaccttatattaagagtataattatatttttgtaactataaatattattttcatcatgttttacactcatttctattgagacaaacaattcaacattcaaatttatgtattatgttctcttttttaaaattatttctcttctatttttatcttctgcatttctttcatttctaccaaatatactcttagtaactaaattattaaatacaacctaacacaagacaagaaaggtacatatttaattgacattaaatacatttcttgaaagcaaattcatgtggcacacgcaagcttaatatactcattctctccattcttaattacttagagagcattagtttcacagcaaaaacattaaaatattgtttttaaaaaaaaattacatatttactgtagtttcaaaattatttacgcatctattgcagtgagtcgcgtcccagcaggacactactggggctgaatcgtccccacaccgagcgtgactcattccgtcgctaattccgctatttcggtcgctaacacttttagcaactcaaatagagaccgaaattagcgattaaattttagtgatcgatatgttttttttctcaaaaaaaaaaaagattcgtgccacgtggtaattttttgttgaataccctgccccccatttgataaataaataaaaaaaagcccccattgggggagaaaaccatactaatgctatttttttaatatcgtacttcaaatggtctaactatttttgtatatacaaacttcgaatggtcataattttttataggaatgtccaatagaggcgtactttatgtcaaaatgctcgaaattaagagaagtaattaaaaaaaataaaaaatagcattaaattaactaattaaataatttaaaaattagactgtgaaaattgttgactgattgaatcctaaatcgtaattttgaggcacttagaggcattttttggaaaaaaaaaaattaattgaccaaatcccctttggctacttgcctaggccttcctctctcaatttcgagcgttttgacacaaactacgcttcaatcggacattcctatcaaaagttatgatcgttcgaagtttatatacattaagtctcaaaatgacacatgtctcaaaatgacacatgtcacaaccaggtgagtcgcacctgactggggcgtgactcagcactagtcgcacctggagggagcatgtccggttgcgtcttcgtgagatacgattggttgctatacttgcgtaaataagtttgaaattacaataaattcgtaatttttctttaaaaaaacaataaattaattttttttgccttagtttcacggattagattatatttttaaaaataatattcttgaaaatcttatttctgtcaaagatgtttagtaaaaaatacttctaattcctggaaatgattttaaatttaatttaatttaatttaaaacaaaaagattacataaataaatgaaggagaataacaagaaaataataaaatattttaaatattttcatgaaaatataatattttcacctttttacatggaagcagaagatgcagaatatatatgtgatatatatatatatatatatatatatatatatatatatatattcttatatctacattctcaaaaatccaataaaatcctgtgaaacattcttctgctaagcttttgtaccgatctaccattatccaaccaaaatacgctacccccataaacatttttccgaggtcataattaaaatatacaagatcctaaacaagttattcgccatcaccaccaaaagaacaacaagatcgttttttttttataaaattaaccatggttgtttataaatccagtttgttatttgacgtattggggtccccaattatttaattctaatattcagtcattagttgttacttttatcttatgtttaatcatggatttttttactaacacctacttgggttgtttccttagcctgctttgatcggtgcgtggttagagttcagaacgttagacttgccaacccagttttggaaggaatttggatctgaaccttccattaagtccgctctggagtattttgtggcttaataatttccatttcaccattaaaataaaaggtcgccatataactattcctcacaagctaagtctctattccaaacatactataatactataagacgtaagacgaaagtgtacagcttactactaggtgacactcgctcatattttctaatttaaatttagagataaaaaatggcgacaacgcatatattttgttaactaaaatgatttgccactatgcgattctgcatggcacacatcttcacgttagagatgtaaaatgcatctattcactctcatcatcactattggctatgctcaaatgattcatgttcttttcaagaggtggaagcccatcttcagaatccgaagagttctggattttatcctcactttcaggtgtcgtaactgtccatgcaacagcacaaaatataaaacaaattaggataaaattcccagataatcttttctttatgatacaattttaaaaaaataccagctaagtatacttaaacgcatcagaagcacattcatggcttcatgtaccacttttcaagaaacaataaaaaaaaaaaaaaaacacattgacaactggcaagcccaactttctgttcaatctgcctttgaaaattgattttatgcgatgcacatacagaccaaattctgaaaaaatgagagataatgtaggagcaaaaagtttatgaccacagcggatatgaatttagtgacattacatttggatcaacaaaagtagagtcatggcttacctttcttgctgaataaatatacagacactagagtatgtttaacagataggagtaaaaggccaagggtgtgtttgatttccagtggaagggttccaaagatacgtatgaaagtaaaatcggtttggggtcatgtttggttacctctcaaaagtatgtttgagagtaaatttttacctggaaactgagtttgggagaagacttgggatatttttgcaaacttaagtttataaactttaaccaaaaatgcactaaataaaactgccaaacgaagatgaaaaaaggtggcacagtgcacaaggcttccatcttattgaatccagggttatccccacaaccagggaggctgtttccataaagggcaggcccaggtcacaagccagcaaacttggttatggccattggccaccgttgcataaaaatatatattaaatttacaacaatacataccttcactatcagtaggagcccttggaatctgactctcttgtgacagccaagcattttgaacagaaataatttcggcgctattttggcatttggagtaggccctcagtaattccctgcataaattaatataaaattgtcaatatggaagagtctatgaagtcacatgtaattgagacatttgtcaactgaatcagtatctgaaatggaagtaaaacaattaataattaaaatgaatttgtatttccttataaaacccttgaattaactttagtattatatagtacaaacagatttaattgaattgttttagactacacacttgatctcctaattatagcttgaatacaatcaattacaagaataatcaaggaactaattagaggctatttaggagttaatggcatgctaacttacagccttagaatcatagccaatcagtattatgttagacctccaattagagagacttacacacggaagactcacgggaagtataggctcaataggatagccaagccttataagatgggtctgttgtaattgattagttctgtaagaattgtgtaaatagaataggagagcgagggcattcggttagtctgttagaaagaggttgggggagaggataggctctcgaacattcctatcaggttctttctgtaattcttctctacctcaagggaactcattgtccccttggaggattcatcaataaaatcaccgttctaacattgctatcagagctctcaattcagggaaagattcatagtttcaaccagaggaatggatgcacgaattgaatttcttgagcacggctacaaggggttcatcaccgcacatgagaaattgcaagaattaagaatgttcgaggaagagaggcttgagcgaatagaaattaggaggcaaataggagaattaatcaaagcggtgaggggaatgttgaatagcggaggccacaccagtggcagaaataacagcggaacccacactaattcccaaactgcaatgagtggtggcggaaacttgaaattccaatctttgacggtgaggatacatatggctggacgagtaaggtggaatgatatttcaaaatgaaaggagtcaacaatgttgagagggtccaagcagcaatggtcgcgatggagggaaaagctctaacatggtaccaatggtgggaattatgtgctcaaaatgctaattgggaggattttaaagctgcagtgatatgaagatttcaaccatctatgattcagagcccttacaaattgttgtcgagtctcaaacaagaagggacagtagaggagtaccacaagcgattcaagttatatgcgggacctctccgaggtgcagacccagagtatctcagagggattttcctcaatggcttaaaggatgcagtgaaggcagaactaaaacttcatcaagtaagttatctacctgaattgatggattttgcataacgtattgatgaaaaaaatacattgttaaataagggtaatacatgggggaataaaggaggagggttatcaaggaattacacatcctcaaggactgttacttgggacccaggaaataaagggagtcagtttaagtcacctgagggaagttcaagtatggactccaatagtgtgagatctacaggttcctttagatggagaccctttaaaaggttatcagatgctaagttgcatgataaggccaacaagggattgtgttatcgatgtgatggaagtttggaccagggcatggtgtgccaataaacaattccaagcatttatcttgtgggggggaagaaggagaagaggaggagatagaaagtgaagcagaagacgaagggctcaagagtatgcagttgtccatgtatagcattacaaggttgacttccaacaagtcaatcaaattgtgggggagaaattgcagggactaacgtgctagtataatctactctagtaagagagagagaaattccagtgactacaaccccaccttacactgtagaagtgggtgatgggagggggattagatgtgaaggggtatgcaagcaagtgatcttgcaagttccaggattggaaattcagcaagatttctttatctttgaattaggaggagtggatatcatgttgggaatggagtggttggcaggatagggagagagtagggccaactttaaggatctcacattgaaggttcccacacctaatggtacacaaatcttgaaaggagaaccagctatgtctagatcagctgcatctttcaaaacagtgatcaaggcactgcaagatgaaggacagggattcttgctgaattatcagtttgcataaagaaatgacagacagctgcataccacaatacttggaagatattctcaaggagtatcaagaggtgtttcaagatcccatagcccttcctccaccaagaagacatgaccatgctattgtgctgaaaaaggggactacaattccaaatctcagaccttatcggtatccacactatcagaaaaatgaaatagaaaaattggtggatgatatgctgagttcaggtgtgattaggcccagcatcagcccgtatgctagtcccattattctagtaaagaagaaggatggagggtggaggttttgtgtggactattagagcctttaataaaattaccatccctgacaagtttccaattcccacaattgatgagttgttggatgaattgggaggagcaactatcttcactaagctggacttaaaatctagataccaccagatcagaatgagggaggaagacatccagaaaactgcattcagaactcatgagggacattaggagattgtggtgatgccattagggctcacaaatgcaccttccacatttcaagctttgatgaatgaggtattgagaccctatttgagaagatttgtcctagtttttttttttttttacgacatattaatatacagtaaaaatggagaggaccatggtagacatgtaagagcagtcttatccttattaaaagagcatcaactgtttgccaacaagaagaaatgcagttttggtcaaggacaattggaatatttgggccacataatttcaggccaaggagtagcagctgatcccaagaagctggaagtgatgtttgattggcctaccccaaaagataccaaggctttgaggggattcttaggacttacaggatattatcgacagttcatgagggactatgggaatattgttaggccactcagtcaactattaacaaaagatgggttttaattggagtgaggaagcacaactagctatggaaacactaaaaaaaactatggctgaaatccccatcctcacaatatgttgggaaatcgagagggtaaatattggagagatttacaccaatgggttatgagtaaccatataagtgaactagacaccacaccttaacccaaaaccttaaggctcaggtttatgggtcttatcctcacttatatggtgcttaacttttccttttctatccaatgtgggactttacctcacacttgtacttcaacaatctctccctcaagtgtgagtctctcccacatggtagcctccccctcgagcagaagtcattatcatccacgagtattccatggtggtcattagagttcacatgctctagtaaacttgtaccgccgcaacacttgcaagactcgctatctggcctccatgcatggactcacccgcctggaagactttcgatacaacagatctccatgtccatggatccatcgtcgacatctttactcgtccgaaccggtcaccaagtcgaaccatcggctctgataccaattgttgggaaatcaaggggggtaaatattgggagaatttacaccaatgtgtcatgagttaccatataagtgaactatacaccataccttaacccaaaaccttaaggctcaggtttatgggtcttatcttcacttatatggtactcaacttttccatttctatccgatgtgggactttacctcacacttctactcaaacacaatgcctgattccagtcaaaacttctgcatagagactgatgcttctaataagagactaagtgcagtcctcatgcaacaaggtaggccagtggcttttcaaaggcaaacattgtcacaagtcagtgtatgaaaggaagcttatggccatcgtcatggctgtaacgaaatggtgacattacttgggaggaagtttatcatccatacagattagaagagtttgaagttccttacggactcaactcaaaagggatgaaataagcttcagaaagaacaaaaggatagctatgtaaattaagtataaataaataaattacaatcataaattccaggtttgaagaaacaaagagcggctgagtacccagttgcttttctcatttgatgggcagggataaataaatgccatgttgatgttcaacttgtgctcccaaatgtatcagaagtgaaaataatctcaataacaaaatatataaatgaattatatcatacccattcagagacataaaagcatggccccatttgaacttgccaagcaacaaatttgcagttttttcttccccactgcaagatcatagtaaagaactttaaccatatagaattgagaaatggataatattctataataaatattaattcaaatcaagcaagttagcagtaatattatacatgccgcaaatgcaagaccaaattttttatttgaatgtttgtaattgttccatttacaaacccctttggagatagcatgatcatgcacatctctagcaatgacaatctagtagcaaatcagacaacaaaaaacattcctgacaccaaacttcagttattttttgaatttttgggcggggaggagggggtgaataaattatagaacacaccaaagaaagaaaaaagatatcctctagttagtagccgcagataaggccattttgtaccatattgtcaaagcagcagataaagcctctacacaagatagctgacatggccgaccataatttactggatttgctgctacaagccatggcactgcaataaaaggaaaatatgaaaactaattattgttacattgcattccatgtcaaattgtcaatagaggcaacctttaaacaaggcaaaaaagattaaatacagtggtactaggagtttttaagcatcacagacaactacaatagtacattagtacttgagccaagcatggatatttccatagactaacatatttgaaagtgtacaaacaaataagcatgcaaaacaaagtatataaaaccaattttgaatatattgttgtcagtggttaagttcatacagaggcgaggagcagtacaacgcagcctcacgaaaggcacatcatctaagcgtgcccatgaacaatccacaacagctaatcctttcttctggattaaagagtaatcttctcttgagacacattgatttccagcaggactgtcaacagaatcacagtaaatcagtaatcactatttggaggggagaacacaggaactcgcaatagatagctacttaacagtcaaaagagaatgcattgttttagaagaatagcatcgtaatgcctaattggtcaggctgggaaattttggcttcaagaattgcttccttaaaaaatgcttcgatagaaatgttgttatatagaaacaactttatgtgaactttgtttttcttcttttgctttctatgagaagcaagcatcaattgcttgcttatctttagaagatttttgcctctcctgtcataaacttctatactgtgatcaaacacctcaaaaaatcaaaacatgtgtttttcaaactaaaatatagctttatcaattgcatagcgttgtaacaggttcttaatgaagggattagtaggtgttagtgctacaaatgcattaacaaccctaatagtgaagactcatataaggttctaaccaactacctacagtccaaagccaaaataaattattatcttcaatgattagttatcatccattatttgagaaaagcacaaaaactaaatactcaaccaaagagctttcaagctgcagtaactttaacaaaataaattatattgcgcgaaagagacaggtaagcaactacacaactaatagaggcagaagccaagaaaatgccctaacaactagtagatgaaaatcatgaaccagttgacatgatatatcaagataaaccatgttcaggcaaaagtaactaacattttcttcatgcatatagtaagaagaaatatagtttccaacaaaataccttaaaacaacgcccccaaaaccattactcacacgtaactcctgtataaaatcaatcaaaatcagtactactaacatattaagctactttaaatagtgcaatttgaccttcatagaatataaagtgttatttattttatttgccaaagaaatagctaaacctaatcatgacaacaacatctaacatctaattaactcagaatgtctcagatacaagatatatgcatacatatttatatttccaggcttatgcttatatatgtaaatatgtatgaagtatgaacacggtacactaaatcatgtgtgcaaaagataaccatagaatgaacaaaaaagaaaacaaatacttgcttttagcatgcccaatcttgaaagcttgcgtccagtgcaccttttggcatcgcattgcccaaaatcctgagccaacatcacaaaccccaattacatccaaaatacaaagttacattacatgccatatgaaaattagatctgaattcagagataaaatatacagtaataccaaacaaaattgaaacaacttttcccaatataattttttgccaacagaaataggagcggaagcatgacagaaatccataaaaaaatcttattattttttatctaatgccaactgattagttaccataagttttgataaaaatgaaagaaagaaaaatgaaacttttttaagaaacccaacagtaaataaatagacaagaatggattgctagaaagctcggttaaattaaaataagtaaaacggttatatgcatacccacattgcaagctttatttttggttccgtgagctcctcctcctcttcctcgccctcaacattttctgctgttagaaacaacatatcgtgttttgtttgaaaataaaaaaagaaatttgaactaaaaaaaaagatggaatcgaagagtacctggaagagagctttgagaatcgtcctctctgaagtacagttagataaataagcaaacccgcgtaaataggaatcaaaaatcgaaagcgtaagtattgggaaagaagttacagtaggagttgttggtggtggtgtcgacttgattgtgcgcgatgagttttgaatctcctttgtctattattccccatttttgcgaaaggaaaattggtcaccaaccaacgaacgcgttactgctagctgcttctgctatttattgttttggctctcccgaatcagccagaggggtttagttttaggtctttaccgacatggcaacagggcggggcgggcgcagcgcctttaaaatccgtttccgcccccgcctccattttctattgggttttaaaattcagacttatttttgtctttgttggggttgagttttccctgccctatgcctgtttcactcctattattaattaaaaaaataaaaataaaaaataatgtgactttttttttgaaaaaaatgacaaaaaagttgactaggtaacaaaaaaattaataacaaactcacttcaaaatatgagatcataatttaaaaattattaaacaaaatcaatcaatttaattaaaatcattatggacctacatatttaatttctcccaaaatataatatcatttaaatatatattgttccaaaattaaaataaaacacaacaaagagtagaggtccattgcagtaacaaagcttccaaaatggaattaattcagaaagttgttggtcaaggttcagcgtcgtcgagaatgagaaatgaggaggagggttagggtttcgggattttattcttatatataagggtaaatttgtaatttaattatggcgggggcggggcgaggcgggtaccatcattaccaaactcgtcctcgtccccgaatttttgtcgcagggtcggggtgagacgggtatcatcaataacaaatttggtttttccccgttaaaatcgggacgagttttgacgggtacttacggactcgaatctcgttgtcatgcctaatctttagtagcacataaataatataatacatatctaatttattaaagtaattgttattaaaggaatcaatatttatatgatgaatatattatttacaaaaatttaaattatattttgtgattagtaaaaataaaataataagatgaaaacttatgggatgcaaatttgtggataaaaaaaatatggtttttttactccattgatccataataattttttaaattttaaaaaaactaaaaccaaaaaataaaatactcaaaagactaaatgatattttaatcttattaaaaatatataattattttaaatcaaaaaaatataaatgataattgtgaataagcataacaacaatgtaaagcatggacgtgcaagttgttccattttttattccaactaaataacattaaaaccaaaaacaaaaacaaacaaaagagcaaaagagcaaaaggcattttaaatatgtcaaaatctataattatttaatatatataagtgattattgtgaatagacatgatatcaaaacaagacagaaatgtgaatatgtttttcgttctcatcttcattctcatttttgtctctatccttgatttctatcagaaataaaatttcatacccaccttcattcttgtgtgggttcaagtatatttgctatcttcatatatctctactaaatttttattattttacaataatatatttgtagatattttaaatcaaaatttagaataacttttagtataagattttatttatgaaattatttaaattttctttataaaatttctatttaaaaatcattttataatttttttaagtaaaaaaaattatatttatattattttttactatcaaaatcttaaccttatcatacaaatattaattaataaaatatttatttgtaaaattatttaaacttattttatatgatttttaagtaaaaataattttataaatttttaaaataaaaatgttaccattcaaaattggatatattggttccgtccacatccttccactaaaaatgattattatttgaaaataatatatttgcaatctaattttaaagaatagatataagtataaatatgaaaagaaaaaaaaataaagagagagaaagaaaggatagaaagaaaaaattgaatgatagttacgtgtatcttaaagaaagataagtatatacatatatgatagattaaataaaatgtttattcatattattttaaaatatacataatataatattaaaaaaaatatttaatacaatacataaaaataatatgtaatatcataataatatgagagcatctttagtaatatatctcaaattaagatcttagattattttttatggtcttcatagtgtcacatgaagatttctctcactttatttttagtgatagatttaattttgaaatcttagagaaagaatttttttttggataatgtgcatattttgaaagttcttctatcataactcattattcaagttggagatctcctcacattttttattagaagatttagtgaagataggatcttgagctcaagatctaacactaaagatactatgataaattataatatatatttacatatttaataataatgatagagggaaaaggtgaaaaggagtctgtagttgttgtgttttttaggaaatagaacagaaagaatctaaaaaaggaaaagcaaatgaggtgttatagttttggaagaggaaaaagattaaaaagaaaaaaataaaaaggaatagagaaaaaagataaaaaaaaaaaagtgaaaagaggtagagaaggagttttggaggggaaacttttaacaaggtgtttgatgtgttataagaaaaccttgttttattaatagatatatagatatagaaatggatgggtgctcattttagtatcactcttaaattatttaattagaaaataataattattggtgaaaaattagaaggatgaattttgattaatttctgtaaaaaaatgtagcattgattattaatatttttattaatgaatgggatttaaaaaaaaacatatctaggaaaaattttaattttaatttctacaaatgtagaaaataataaaaggagaattttatctattaaataagaataggttatctttttcccttaaaatcatggaacattattatagtaattatgaaattataaaaatgacaagaaaaaataaaaaaaatatattttttgctcatcaaaatagtttttttgattaattttcctcttactcttgtaacaaatatgtgatataccaccttttttgttacattaagagtcatgtgactatttagtgattgacattgtaatagagaccaaatctaacaatttttagaagtaaaatgacattaaatttaaatcacaaaatactaatcaagttggatagaacaattgtctatcatggttagtccctgtcaatgaaatgtgaaaaaaaattatgacacttatcaactctcacattcattctccacttacaaacttacatgttgggactcaccattgataggcatttgtcataattattagttaacatatttagtatgtatcccattaacgtcgttttagtttttaaagttgtctattcaatcccaattaatgtgttcataattgaataattaagtgatatgctcacaacacatgtggccactaaagtgacaaataacatgatacatcacatgtttactaacaaagttggtggatgactaattataaggactaacttgactaacaatttaaagggtttatttgtcattcttatacttataagtattaatatgacaatatttcacaagtttaaggatcaaaatgatagtttagtcattcaataattttgagtacgagtatgaatttttatttcaaaatttatacgggattgagtttgtacattagtaagttaaaatgtatctcattccacaatcatgtggagataaggaaatgtttcatttatccattttatctcttttttttttattgcattttcaacatggtcttacttgttcatatgattgactattagacaatctcacacctcattgataatgactttgctcgagccaaaattatggctaatatttaacattaactttgtcctaatggttcacgtaagcctttgacgctaacatggaccatcctatcaccttctataataatatggacaacccattaaccacatactatctatatgaaactcttaacaaagtaagttgttttacattagattcctcatcaaatatatgattaatgatatttgtcccactaatttatatccatttggacacttggttaattacttatgtaatttctcacttttacgctcttaattctttccctaatttttatttgttggaaaaaaatatttttagttattgtattttgtaaagattttgattttgatttttgtgtttcattaatcctaaaaccagatactatataaaaaataatattaacaatatctacttatttttaaaagtttaaaaactaaaatattcgatgataaagtataaaaactaaaattaagaattttaaaatatataaaaattaagaatatattttattatattttattttcctatttttttatattttttaaagattacttattgaagattgtcttgccattttttattatattatataaaattgattttaatttatataaaaaaataacaaataattttgaattaatataaaattttgaatatatgatttatataaaattaatttttaattataacgataaatttttaaaaaatattattcaatcaaaaagttataaaatgatataataactattaatattatatcaatataatctgattcctcaaagtataagtattattttaaaaaagttttaaaattcatcggtgttaagttaattgggtgttgtgtggcgtcaagattccgggtcggactaaaactaaacgggccacacgccatacgatcaatttctaaacgcaggacaagattggagattagaatcacaaactgcaaaattgttgtgtgacttgaattgtgtagccaaattaaggtcgtaaccgtagttgttgtatgagtatcaggggcttggggaacacatcattccctccacactcccactggatcttcactctcaatctcaacacaccctcttcccactgccatgttccacaggtaccctacgcctatccaatcgaatcttttttcattcctttgatttctctaacctcactttgctgtgacgcgaactcattcttaggtccattttgcaaatatcatctcgcccagctcttagaaggaaccccagacgttttgtataccaggtacctacctgttttcaatgcaattaattgatggaatatagtggaggaaacaaatgtctaatccgggcactcaaattgcctttgctcattacccatatgttttaatcttttcaaccattttggtctttacccttaacatgtagatagttctgctacaaagtactttactagttaccaaagaaaaagaaatgcttagcacaaatagtacaacatccttgaatatttgaagatgggagattactttataccattatgacgggattgtcactctcgcctgaatgtatgtcccctgttgccatgttgaatcgagtcgaaaagcattaagcactcaagtgcagcatctaacctatctgcatatttggtgtcttcatattatacattgaattactgcttctaactaacaaaattgctagtattaattccgtaataacaatctgtggcactgaatattgtgtgataaaatatcaacaagagaataaactcaactagaagaaatgagaatgttgcattggatgagtggacatactaggcaagataggattaggaacaaatgcattagagagaaagttagagtagtacctgttgtagaaaaaaaatggtagaatgtcatcttagggtgtgtgtgagaagatctgtagaagctccaattagaagagtagattggatggagggtagctatattactaaaggcaaaggaagatctagaataattataggtgaaactattagaaatatttggaggtcaatggtttgtctgtagacctaattttgcaatagaatggcatcatttaatccaaatagccaaccccacttagtggaaagaggcttggctgttattattataacacaatgttcgatgaatttatatgcaaaatgtattgcaaaactggtagtgttaccacttctcattgcttttgtactaaattgattataggaatgtaggacaggaaagtgtagttgaaatacattctgcttgctataaaattaaccatatactgtatttatgtgtgctaggaactgcttaggttgttgatttggtagtgcttatctccaatttcaatcagcttcatatgttacatctttctaattcattacccttcttttctttttcacataattcagcggagacctttacatctatcttcacaaaagaatttctcaactacatcgaaaccagggggtgcctcagcttctggatctccgggcaagccacccaagtctactggcactctatcaaagtttttcattggaagtgtagctttaggtgctgcttttctggcagcttatcagacgggttatttggatcaatatcttaagaaagagcattatagtgttctgcaggaacctcatgtcaatgcaactattgaagacttgaagagtgtacaacattcaacggaccagttaatttcacctagtgagaaatttaaccacgaaaatcccactgtagagattacagagcaggagattgatgcccatttttcactgccagaaattgtagtagaagaccaagtggataaaccgattcctgtgcaagacaaatctgatattgctgaagatgttattgctgctgccaaagaaaaccaattgcctgaacatcctcaaagcagtctaacatctgatgatccaagtaaagaatccgtggcacaatctgatgggattattggaatacaaagcactgagacagacaatgcccaaagactggaagagggacatcatacatccacatctacacagaccagtgcagttccagatgaaaatgggatgaaaaatattcaactagagcaacttgaaatacaagacacagagagaagagaggtacttatgagtttttgttggcttgatatacggttgtatcattcagttattccctagcattcaccaaggattttttttcctgttattttttttctaaactgaattttgacatttatttctttttaatatatttcctttgttactccattacagagtgcattaggcaatggtgtagagcaacaacctaccctccttgaggagtatcagttaagaaataaatcagaaagaagccctgcaacgtatatatctagtcatggctttactgagaatagctgttttcctgaaggaaaagaggttactttagaatcttgcttatatttttcttttatgtgtggtacagttatttatgatcttaatcatacatgaaaactaaattgttgaaacactaggcacttagtggtgcaatggaggagttaaaagatggttacatttctgagaatgggaaactggttcttgatttcttgcaagccatccatgccgcagagaaaaggcaggctgacttagatgcacgtgtttttagtgaagagaagaaagtgttaaaggtttggcctataaattatcatcctttgtaacccatcctctaaaaccatgcaaacgtgctttgtttgtagcttttttggtttattcatgagctttgaaatctttatttttacttgaaactttgttcatgttaggaaaaatatgaaaagaagttgaaagatgctgctgccagagaacttatgctcactgaagaggctgcaatgttggacagggtaaaaatctttttggtcttctctttttatttatttattcaatttaacgtatttttgcttgttgatttttgtcttaaatacatgggttggaataatgagtaccaaagacattgagagaggttggctctgttatcagaacaaagaataattcctgtttaagtggtgatggttgatgggtttgttgttcaatgtatatacatttaactcaatcatagttatttactcttgattcagcaaaatagtttgtattaaaattgaagctatactattatattctgagtttgacttaataatggtcacacaaaataatcagattccaatttgaactcagtctgtcagatttattttgtaattgtgaagcttgtccattggtcaagttgaatgatttctttgatatgtgctgtttgcctttccctggctgtttctgcccagatgaatagaatccaaatctataaagttaataactctctatctttcctcctttttcattttaatacttttcaggagctaaagagagagagagcaaaagcatcccttgctatcaattcacttcaagaaaagatggaagagaaaatgaagacagaacttgaacaaaaggtgctcattttgttttttgttgattttacaagtactgttttcccactttctctacatgtctgctgttactgttatcagttacgatataatacttgttaaataaaatatatctttggtaattgcaggaaattgaagcagaattgaagttgaaacaagctcaggaattagcaaaggcagagttaaatgcagccatagcaaatgagaaggcagctcaaattgaaaaaatggctgaagcaaatgttaatgtgagatttctgttaaaatcaaagatgggtagatgcacccattttaaattattcatagcttgatttcaattaatttatgaaaagggatataattttgataggtggcttctagaacaataaaatagccagaatagttttatgagtataaaaaatttctggagcaacttatacaaagactagctttgtcaaggtctaacaaattaactcatgatgtgcaaaacaatttccagttatggctttagctgtctcttgcaatttttatcagaatattgccaattagaactctgcttagtaggcaggtgcattcttagtcatcaatgagtttctgaacaaagtaaaagtttgtttaccagtatattaattggtatagtatgtaatctaccagtgttaggatccaaatgcaagtgcaaacagcaaaaaaatggtgttccttcatgtattagtgatactagggaactgctttacatgctgagaacccaaataacatcaaatctactatttgtttgagtctcctctggtttgtggtagacctttctgtacatccaaagcaaaatgttgtataaattgtttgcagataactttcagtacagatgcttatcatcctgaatggaaatgtgaaatgtaaataagtgaatttcatgccttcaaatatttttggtctacggactgtgttggcttgtcaaaggatgaaccataccactataagtttacatttgattgtgctggatatttattttgtcagtggaagacattattttcttttcaccaatatgtgttgttagacaagtacagcatgtctgccttaaattattgggaaaaacgcctgcttatgcaaacttaagcttctaagaattgatcaggaacattcatgttgaaaaggacaaaacactgggtagacttttgatagttgcaaaattgacatcatattttagccagcaattggaatttttattaattgacatacctgtggactttatttagttaaagttgaaatttgacttgtttaaaaaatttctttccctccatttctgtagataaatgccttgtgcatggcattttatgctcgatctgaagaagctcgtcaaagtcatgctacacaaaattttgcactggtaatattttttctttctcctgtttctttgtgctgtttttatctgtctttggccgtagaggagcttaatgacaaaatatgggtttatagtattgtattgatttttccaatcctgcttactattttcttttttgtgcatggatcctgcggagagcacttgcattggaagatgcactatctaaaggactgccaattgagacagaaatagcatctttgcagtcttatcttggaggtatagataaagattcagttttggatttggtgctagcatcccttcccaaagaaacacgaagcaacggcacagacacacaactgcagctaaagcagaaggcaagctgtgttcttgtctgtatttaactttacatggagttttttgtattacatgttctatataagattgctacatttcttcaattcttctcaagttgttattactttttgaccttgttaaacttttatttgaatacctgctaaaggttatattctctggatgcttatagcatggatataagtccctttaaattggtttctgtaatttccatcagttatcaatcccatctgttatatttttgacattctttaatgctcctatcttgtgaagctgccatagtgataaatttgtacaaaacaattagaattgaccggtgaagcaattctggaattacaaaaattgcagtttcctgaaatgcacttgtctgtttctaaaattctagaatgaatcatttacttttgaatttcagtttctaatttttgcgttctgttgcagtttgatgccttaaaaggtagtgtaagacacttcagcttcttcccaccaggagggggaggtatgttggcacattctttggcacatgtagcatcctggttgaaggtatgtaattaactgaccagcatgccatttccatttaaggctgtgctttatgtgaaaacaaaatttatgggagaagtaataattggtggccatttagacataatacacacttcgatacattaactctgtttatttctccccttgccctaactcgtcccattttcatttctattgagctcatcctaagttcaaggagagatatatgtttgactttggcatgtactcaggttagggaagacgatcgattgggtgatgggatcgaatctgtgatcaataaagttgaagtttatttggcagaaggaaaacttgctgaagcagcagattgtctagaagaaagtgtaagaggcacacaagctgcagaaattgttgcaggttgggtgaggcaagcaagaaacagggctatttctgagcaagctgtgctgctgcttcaatcctatgccaattcccttagccttgcatgattctcgaattttgaatatttacaaaatcatgttgattcaatacaaaaggttgcagagattatctttggcagattatgccaacgggaattattgacctacgaggaaaacaattaacgtttttgtttcatagcagcggaaattagttgattctgtgatttctgtgcaactccaatggctttggagttttgactgaagtgatatcaggctctgtataattttgtcttttgttttactgaataacagaaatgttgtattgcaacatattgaaatttcaattatatacctcaggcgatcgggaaaaggttggacgtcacatgttcatctttgctttcaattaaagtaatggttattttacttatttattattattttttgagggttggggggggggggggggggggttgaaaattatttagtaaattgatggtaaagtaaattattgaaaagcaaaccagttggagtataatttatatgttaataaatattgttatagtataaaacaaggatattttttaaatgggattgaagtaatatgcatgataggttagaacgattattgtaaaataaaataaaaataaaaatcaagacctttaaaaatagacccaatacttatatgtttcttacatttttaattacacagtgctccttactttaagaacttacgtttgaattttaggcatgctctaagtggccttttaatttctgaaatgcgccatttcgttgggaggagagcatcattgatgcgaagactgacttgatgatattctctcatcctaaactattgaattatcactaattttaattttcttgcagtgttataagaacatctttaaaaatttatttatttttaaataatgtatatattttaagaaattttttacaaaaatctaatttttacgtttaagatctcttcaccttttttattgaaaaatctagtgaagatcagattttgagtttaaggtctttgttcaagatctaacactaaagatgttcttagtagctcacactttcttagcactaacacaagagaaattatttaaaaaatatataatttaagctatcccatataaaattaaataaggtataattgttttttgggttttcttttttattaaaaatatgtatgcaagttttaatgcatataactatctctatacatattcgtattagattatgtcaacccaatcccgtgacctaaaatttttgtgtcgtgattgtttcttcattctattctactttcatcctaacaaaaatgagaataagaaaaagactccaaacctactaaactaacccctgccctggcttgacgtagatggatttaattcgggtcaacataatggaacaactaatcaatgctatacaaagctattgaattactttgttattgttgtttggtttaagtacttatcaacgcaaagtcatatattttgtattatggattgctataacaaaatagaaaaaaaaatcattgtgccaaataaccgttattcaaaagcaaaaacagtataagttaatgatgtttttctttgcacaatgactagaatgaaatttaataagacttcatgcatattatcttaatgaggtttgatcaacaaaatgaacacttactggtttaattgtgctatttatataaaatatctacaatagtttttatgatataatatttttattttatttttctccattacaacaataattttatctcacatttgttctctatttttatttcctatctctttcttattgtataaatttttgcataaaaatgttatataaataaatattatttttgcaatttgcctttaccataagaaaaggtgttatcagggagaaggacttctctttttctttcatattttaagatgacaattggtttgaactagcttcaatagtcatatcaatattcatggtgatagaagcagacaaaggcataacgttatattcttcttctacaaatttttcagatgctttgtaagtaaagtatcaaataaaaagaaaaggcaaataatggtttaaaaatataaaaaatagttaatattttctcagttttgctagtaggaaagttaataaaatgttataaagaatttagaattgacaaaaacatttgttaagaaactaaaaataggaaatattaaaaaatactatgataccctctcaccataacatcccaacataatttttaataaaatattttatgattaattcatttcttatgttagcgagatcctaagagaaacattcatttattatcaaggtcatgttgtgtagctgaatatagtaataaaaaaaaattggtactagtcatactattgttgatgattactgacttctctgacatttttcttatcattatttaatttgctttttagttttgattatttgataaataaacttatgtaattagcattaacattcttaaacattttaagatatgataatttttttagtattttcaaaaattccatacgaatacttgttaaagcaaaatcataaaaaatattggtcgcatattattattatcattttagaaagaatggtataacaaggagacatcctcaaactaccacggtgccaatgatatgctcgagatgtcaacaaagatttactaagaaaattactacacagattcgagtcgttaacagttttactcaaatgcaactattcaactaagtgacaaagatttcctttcacagagttacacatcaaaccaaaaaactatgttagagttacacatcaaatgaaaaaactatgttcacagaggaggtgaaaattcataccgaatcattaatcacttgggtcaatcacattgacattacaagtgcaatattaacattggttgcttcgtttttctatttttaatataaaaatataaactctggttgattgttttcaatcattttgtacagaacaacccccaaatgttttcttcttcttcttattattatctccaactccggagtctactatctcaatcactggtgctaagtggtgacatttcaacttccgttaatattagtattttagggagcagaaaaacgtaagccctcttcataaaatgtaaaataaaaatagaaagaaggaaaaatagaaccccgcttatttagggcttgtacttacattgtgtttgtttaacgaactaggatgagattattttttattcaactcattcaaaattttaataagaattaatatttatttaaatttaaacttaattcgttaaaactcaagaacatataaaataagattgaataaatttgatttgttaccataatatattaattttaacataatacataattttattataaaatttaaaattttaattaatatacattttataatatatatttcaaaataaataatattaatattgttttgagatgaattaacggtggatggttgcataactcctctgacgaggttctcctacggatgtgtccaactatttgcatccatatccatatagactttgcatacttatagagtctctagcactcaaatattagagtttgacagagtaatgacactatggttagattgtgtatatgatttaagtggaaggggtcttatttatctagtgtttttttctaaggtcatagcttttaggtgataatgaatccatcctttctgttaagagcgtgaatttcaatatgcaatattagtccaattgtatacaaaaatttgcagctgcaagaattctttggtgtcacctaagccgatatgatatgattaataacaatagataataatgtaatgataatccttatgacgaaaactattaagtgatcaataaaagaagttataaacttcttttgtcaatggttagctataaatgcttggctttgttatttcttcggtataaatataattataatattacgttatataaaatattatttattaagtcaataaattcaattattaatactaaactcaaaatactaaactaaaaattaatttataataatcttattcgattttaacaagaagaaaaaaaacttaatatatgtctctaattcgtaaatctgctttgcaaacctaatgtactaaattgagatgagattagtttaagaaaataaaacatataagtgatgagattcttttgatatggtagggggtcccaatcataagagggatattaacagcaaatgtttaattatatctaacctcataacttgccacttcatattccagcttgtacaaataattataatttgcttgtctctctctcgtggctaataataacaccgtttttataataaaaaaaaatgcttctcattgtattttaggtaccaaaataaaactttgtactagtattttgttaccgtaagttgcgtcaactgtcctgtcctactctgcatcaatgcattgcaggtgtgttatcgtttacgaaaatcataaaatgtaactccattttttatgaaagaaaatattgcatgtattatgtacctatttatatttcaatcaacaaactaagcacgctgaaaaagataataactaaggaaaaaaagagattgaaaattgagacaaatctttaatgatatttcatttctggttggttagactttttctattttcttttaacatgtaagaatcgaagataacactaaagaatttattatgtttaatcaactgaattaaattttattatctggttagacttgataacagtattatgtttggggctcaactcaaactcaaacccatgtgatgaacagttaaagttaggttcatcgtagatattgcatttgctttggtaccaaggcacactaaaaaatgagtgtaatatttggtgataaattaacatataacttgacttgaaactgagagagtacgcaacatttcaatctcacgaaaaatagaaaatgagacttaaaagaccaaatttatgttaaagtagagttgttgcattatattccaatgctaatcacttgtccatttgatgagcaggagacctcgaatgcaatttttagcaacacgttgacttctagtttgtcatgggctctgaaacaacgtttgagtttattagacatttgcactttttgggtatagagcgatatcaatttttgtatcaaataattgttggctttgtatttaactatataacatatgtctatttacctttggttgaggtctacattagatacatcatgtacaaatgttttaaagaggtgaaatcatcggttgactattcaaagttttcttggttatattttatgtaaatgttataaagagattgaatattgtaattattgactcataatcgagattaaatcttaaacaacatgtttttaaggaagtcaaatatgatattcaaaatccaactttaaacacacacacatatatatatatatatatatatatatatatatatgttttaaggaagttgaatattgtacttaagatccaactttgtttatattcgatcatatgttttaaggtggttaaatattataataaagtctaacttaaaatatatttaatgcatatattataagaaagtcgaatattgtagttgagatattttctatttttatatatgattattaaaatcatttttttcattattaaatatttatatagaaaatattttattattttatttttgttgagaatttggattgattcaattttaatgtaaaataaataaatatacaacaaagaaatgcaaatataactgtgataaaagagacaaaagaaaaaaaaaccagaaattgttataaatctctgttgtatgaacaaacaataaacttacaaatttagattaaaaagcaatttttttaacccatggacctagtagtggagcatgagacttatgtttgatttatcattgtaaaaaaataaaaaataattatttatatataaaaaaaataatgaaaccaagcatattgaaaacctttcatctccaaaatttgactcacgtggagtgtgtgaagccgacgcttagctgtcagctaataagctttgctatgaagctgaagtagccactgtcggtgctccggtgacggcgagatcctcaaaaattccccaaactaaaccatcttgccctcaaaaacacttcctatccttccatcacattgaaaagtggaaaacgtaagacacaacaaaagtaaaaataaaataaaaacaaaatagaataaaaaaagaaaaaggtacaagcaactacatttgttcctcttccaattgtgtcgtcttatcttctacgaaacccattcatagatgcatgtgatgtgcaccttcttcttcttcttcttctattccactcactccctctcacaccattgctgaattcttcaatattcattcactgtacttaaccatattccacttccacccataccttgcttacttacttacttcgatattggatctgaatgaaccaatgatgctttgtctcttccagatctgaacttggttcaactcaaactgaacccaccatcactatggccacctcactcgcttggagactctctgccaacaatggcaccaccctagccgcaaatgatcgggtaccttcttcactccagtttcatctttgtcttctgttgtttgtgccattactcatatcttcactattttattagttaaggtcaaaagtgttgtagtcagtgtttgcatggggtggagtttatggatcttgttcccatctggttgcatctgggtattttctgcccattgctctgttgagccaatgttttactctcattctgtactactgtactggatatctgacaattctaggaagtattatcgaggatcactcattattggaagtttataagaactatgggatttaattatgcaaatattaaggatttcctttttgttgttttgctgatgtgtgattcgtatgttaatttgtccccaagaaagtagaaacatgtttgtgactgttctacatattgaggtgtgtacactttcatgattgtagcatgattaaccgttcaacagatcttgtgggatgcagggcgtaggtaaaaaaatggaaacaaaggatggggtttataaaatagttcgggcctgtttgtgtactttactgaaatgttcataggtttgttaagatatgtggttctttgctgatatcttaagttgttgtacgattttcactgctcatcaggtttcccttatgttttgctcaatgagatgcagtactaaaggatcaaaaatcaactgtggtgaaagcaagagcaacaaatctatttgtttagtactctgaatgttttcattttcttgataagaaatgcaatcaaactgtgatatatattggttcacctatcttccatttgaacttgatgtcccatttcatctcctctttattttaggacatattacttagttatccatccatcactggctttatgctattcctctgtttgtgtttgttttttttgtttccaatgttttagttgaagttttcagagatatgctacataccttgccatataacattccctagtttcacccttttgattgcaggaaagaaatggtgacgggaggactcaagattcagagccccctactccacattctgttatgaaaatgggatcgaggttggttacagcttaaaactcacctaaaaaagttgtcacactacaggaacagtgtgcaacctgataaaattattgattaattgcttgcaatactgctagaataagtgattgtaataattacttgcagccaaacaagctaacagtctaacccgtgagaatgaactaagaaccatgtgaattgatgctttgatttatggactatggacattcacaaatttgtgaacagaaatttgtgaacaaaattttggtttcttacatgttttactggttgcttttgcagagagcgtaacagcagcatggaggatccagatgggacattagctagtgttgcccaatgcattgagcagctgcgtcagaactcatcttctgtgcaggagaaagagtattccttaaggcagttattggagcttatagatctgcgtgaaaatgcttttagtgctgttggatctcactctcaggcagttccagtacttgtttcccttctccggtctggttcattgaatgtgaagatattagcagcaactgtcttgggctccctttgtaaagaaaatgagctaagggtgaaggtcttgcttggaggatgcattcctccattgcttggtctactaaagtccagttctactgaaggccaaattgctgctgcaaagactatttatgctgtctctcagggtggtgtaaaagatcatgttggttcaaaaattttttcgactgaaggagttgtaccagtgctttgggtgcagctgaaaactggcctgaaggcaggaaatgtagttgaaggtttattgactggggcattgaaaaatctctccagcaataccgagggattctggaatgcaacaatacgagctggaggagtggacatattagtgaagttactggcaacgggacagcctagcagtttagctaatgtgtgcaatttacttgcttctgtaatgatggaggatgcatctgtttgttcaaaggtgttgacagcggaggtgacaaaacaacttctgaaactattaggcccaggtaatgatgactctgttagagctgaagcagctggtgctctgaattctctttctgcccagtgcaaagaggcacggcgagagatagccaatgctaatggtattcctactttgatcaatgctaccatagctccttccaaagaatacatgcagggtgagtgtgctcaagcattacaggagaatgctatgtgtgctctagcaaacatctctgggggtttgtcttttgtcatatctagccttggccaaagtcttgaatcatgcacctcacctacccaaattgcagacacattaggagctttggcatcagctctcatgatatatgataacaaggcagaatctaccagagcatcagatcctttggttgtcgagcagacattactcaagcaatttaaacctcgcttgcccttccttgtacaggaacgaaccattgaagcgcttgctagtttgtatggaaattccatactttcaaataaacttgcaaattctgatgcaaaacatctgcttgttggtttgataacaatggccgccaatgaagttcaagacgagcttataaaagctctgttgacactgtgcaaaagtgaaggcagtctatggcgtgcacttcagggacgtgaaggggttcagctattgatatctcttttggggctttcatcagaacagcagcaagagtgtgcagttgccctgctttgccttctatcatatgaaaatgatgaaagtaaatgggcaattactgctgctggtggcatacctccacttgttcaaattttggagacaggatctgcaaaagcaaaggaagattcagcaacaatccttaagaatctgtgcaatcatagcgaagatatacgtgcttgtgttgaaagtgctgatgctgttcctgcattgttgtggctattgaagaatggaagcccaaatgggaaggatattgcagcaaagactctaaatcatttaatacataaatctgatactacaaccattagtcagcttacagcgttattgactagtgatcttcctgattctaaggtttatgtcttggatgctttgagaagtatgctttctgttgctccccttagtgaaattttacgtgaaggtagtgctgccagtgatgcatttgataccatgataatattattgagctctaccaaagaagaaactcaggcaaagtctgcatcagctctggcaggaatttttgaaacaaggaaagatgtgcgtgaaagtagcattgctgttaaaactcttttgtcagccatgaaattgcttaatgctgaatctgaaagtatcctgattgagtcctcacactgcctggctgcaatatttctttccatcaaagagaacagggatgtagctgctgttgctagagacacattatcaaccctagttgcactagcaaactcttcagttttggaagttgcagaggtggccatgtgtgctctggcaaacctcattttggatagtgaaattgcagagaaagctattgcagaagaagttatcttacctgctactagaatattatgtgaaggcacaatttctggaaaaacccatgctgcagcagcaattgctcgtctcctgcattctcaggatgttgattatggtgtaactgattgtgtgaatcgtgctggaactgttcttgcattagtttctttcttagattctgctgttaatgggtctgttgccacatcagaggctctagaagcacttgccatcctgtcaaggtcagaagagaccagtgcaaatattaaatctgcttgtgcagttttggctgaattccctaaaagcataagcccaatagtcttgtgcattgttgattcagagccaacattgcaggataaaacaattgagattttatctcgattatgtaaggatcagcctgtttttttaggcgatactatcatgtcagcacctggatgtatatcttcaatagctaaaaggataattagttccacaaatgtaaaggtcaaaattgggggagcagcacttcttatttgtactgcaaaagccaatcatcaaagactggtagaggatctcaattcatcaaacttgtgtgccaatcttattcggtctcttgttgatatgcttacttctgcacagccttctttgggttacctggatggtgacaagaaggaattcattagcatatgcaggtacacaagagaagaggtcaacggttgtgaatccaacactagcaccagcattatatgtggtgctgacttggcgatatggttactgtctattcttgcgtgtcatggtgaaaaaaataaaattgcaataatggaggctggagcaattgatgttctcattgacaggatctcaaattgtttctcacaatattctcaggtatttaagtgcctttttcagtaaatccaaagaaatagttagtctatttgattctgaccataggtaatacttaatagggaaaatcatgctttaacccctccgcctcccctccctctgaagttttgtccaaaagaaactttagtgcaccaaattaaaatcttacaattcatgcaatgatgcaaactttcaaaatctctcaattctcacttgtacagaatttaacaagttgtatttgatatttatcttctgaaacataatggttggagagacactgaaatgtgttcaagacaatgtatttttgatgtaaaaaatggaaaatgaagtgttaggataggctatgtactcttttaggtgaatctttgtcaaacacaatgatcaaaactcacaagtttggctaatgacgtacccgttgtcagttttaattaaattattatccactatgatgttttatgtttcttttaggatttcagggggtgggggtgacaggttgtatgtttcagaattgtaagctaagttaatgtcttaaacttgatttagacaaaattcatgtagataagctgtaattttccccagtaaatgtttacttctttgctaagacatccttagctgtaaaactgaaacaatgttgctatatgacaattatttttgtatataaactttgttagctcccttatggtgaacatgcagattgactacaacgaagatagcagcatgtggattcatgctttgttgttagcaatattatttcaaaatagagatatcatacgggcacatccaaccataaaatctgtaccagcacttaccagtttattgaagtcagaggaatcagcaaataaatattttgctgcacaatcaatagctagcctggtctgtaatggtagcaggggaacacttttgtctgtggcaaattctggggcagcaggtggacttatctctttgcttggctgtgctgatactgatatacaggatcttctggaattgtctgaggaattttctttggtacgttatcctgatcaagtggctcttgagaggttatttagagttgatgatataagagggggagccacttctcggaaggcaatacctgccctagttgatctgctcaaaccaattccagatcgtccaggggcaccatttttggcacttgggcttttgactcagcttggtaaagattgcccctcaaatatgagtgtaatggtggagtctggggccttagaggcacttacgaagtatctttcactgagtccacaagatgcaactgaagaagctgctacagatctgctaggaattctgtttagcagtgctgaaatacgaaaacatgaatcagcatatggtgctgttgctcaacttgtagctgttctacgtttaggaggaagaggtgcaaggtatagtgctgcaaaagccttggaaagtttgttttctgctgaccacattagaaatgcagagattgctaggcaagctgttcaaccgttggtggagattctcagtaccggttcagaaaaggagcagcatgctgccattgctgcattggttgggttactgagtgaaaacccatcaagagcacttgctgttgctgatgttgagatgaatgcagtggaagttctttgtaggatcatttcatcaaattgttcaatggacttgaaaggggatgctgccgaattatgttgtgctctttttggaaatacaaggattcggtccacagcagctgctgtttgctgtgttgaaccacttgtctctctccttgtaactgagctcagtcctgctcagctttcagttgtccgggcattggataggcttgttgatgatgagcaactggctgaattagttgctgcacatggtgcagttgttcctcttgttggtctactgtctggtaggaactatatacttcatgaggctatttccagagctctggtcaagttaggaaaagacaggcctgcatgtaaaatggaaatggtgaaagctggagttattgaaagcgtacttgacatcttacatgaagcacctgattatctatgtgcagattttgctgaattgttgcgtatattgaccaataatgctagcatagctaaaggaccatctgctgctaaagtggttgaacccttgtttttgttgttgacaagacaggaatttgggcctgatggacagcacagtgcattgcaggttttggttaatatcttagaacatccacagtgccgcgctgaccattcattgacttctcgccaagttattgaaccacttatccatttgcttgattctccaatttcagcagtgcaacagttggctgctgagcttctttcacatctacttgtagaagagcgccttcagaaggatccagtgacacagcaagcaattggccctctcattcgagttcttggttctggtatacacatattgcagcagagagctgtaaaagccctagttagtattgcactaacatggcctaatgaaattgctaaagagggtggtgttattgaaatttccaaagttatattgcaagctgacccttcccttcctcatgctttatgggaatctgctgcctcggttttgtcaagtattctgcagtttagctctgaattctacttggaagttcctattgctgtactggtaaggttgcttcgatcaggctcagatagcacagttgttggtgctttaaatgctcttttagtgttggaaaatgatgatggaactagtgcagaagctatggctgaaagtggtgctatagaggctctcttggagctcctacgatctcatcagtgtgaggaaactgctgcaagacttttagaagtattgctgaacaatgtgaagattcgagaaacgaaagtaacaaaatcagctattgtaccattatcccagtatcttttggacccacaaactcaagcacagcaggcaaggttgttggcaactttggctcttggggatctgtttcagaatgaggctcttgctcgaacaagtgatgcagtttcagcttgtcgtgctttagtgaatgtgcttgaagagcaaccaacagaagaaatgaaagttgtagccatatgtgctttgcagaatcttgtgatgtatagtcgatcaaataggagagcagttgcagaggctggtggtgttcaggttgtattggatctgataggttcaagtgatccagaaacatcaattcaggcagcaatgtttgttaaacttctcttctcaaataatactattcaagagtatgcttctagtgaaacagtcagagcaattactggtgagtttttctttgctaatcttgcagtttttacggcttggctgattgagcaccttaatacttttttcccttctaaattcctacaaaaagatacataataacatgccctcattttactttctagaagaggcagccttggtactggtgtaaagaaaaaacctgattttattggaataacgcaagttttagaaactgaacagaacagatatttaaataatagtaacaattagttctttaacagtagaagtgaatataagtagtgagcctttgtgtgcatttctgatgataattttatgttggtttagttatagtaaaaacataatattgaacattttgggaaagttggagttataaggttagcttggagttggaggtcgtagattcgaatccccccactaacaaaaaattaacaattaacaactaacgtttggcgataaagaaacattttgggaaagttaaaaacacactaaattagggaatacacttctacttttgttgaacaaattgacctaaaatggtctttttgatgttatgatgcattgaacatggtaaatgatttttgccttgctatcataagccaaaggcataacttgattgctaaaaggagaagtatatcaaataacattacatatgaagaacaaatcttttgattaatagaagagctaattttcaattgatcgtgcacctaaaatttatggaaggaaacaaaaattatagaacatgtgtcctgtgaacttcaatctattattacattatttaaacatcaagactgcagttgtgcttgtatagcctcttgtagcaaaaatagacacttattgctttttaagtattcaattaatggaacttgaacaattacagattgcacttcaaagcctaatttacatgtataaagttgcagtttttttcacagaattgattgatgaacaatgttgattcatttaagcagaaacacatctccccctccccaatttatatttctaactaggcttttgttcttatagccgctattgagaaagatttatgggcttctggaactgtgaatgaagagtatctgaaagccttaaattctctatttaccaacttcccaagacttagagcaactgaaccagcaacacttagcattccccatctggttacagccttaaagacgggttcagaggcttgtcaggaagctgcattggatgcacttttcctgctcagacaagcttggtcagcatgcccagctgaagtttctagagctcagtcaattgcagctgcagatgctattccattgctgcagtacttaatccagtctgggccgcctcggtttcaggagaaagcagaatttttattgcagtgtttaccagggacattggtggtgatcatcaagcgtggtaacaatatgaagcagtctgttggaaacccaagtgtttactgcaagcttacacttggcaacactccaccaaggcaaacccaggtcattattttacatttatggtttcatacttttctgttagctttgaatcttttctgtgttgttatggggaagaggctacttgctttttcggtgtatgcactaggatccagtgacatgggtgtaaaagtaaatttgggttttgtctctccatgtcagtcatctacaaatttaaccatgaatgctgtttcttgaatgacttaatattatctgccttttctcaatgaaaatcatgccaattccaaaaatactcaattaggatatgcatttttagagctgtttcctagaaagaatttcagttgatcatctacggatctacctattctgctgaggttttgctacatatgtatttgtagaataatctatttacttaacccaaatcatttttttctgcccctttaggatacgtttgtcttaattgttggtttgcaatttttttggtcccttactcttgggaatactctctagtgccacttgcaagttgtatcttgaccttgattttcaaggtacatgcaagagtttgaatcttgttgaatatcataaaggcaaagaacattgtgttttctgctgaatgtataaaaaaattgaggattttttttatggagctgtattttttatttttacatgttgcatgctgtatactcttttccagaaaaagtgaatatactaaattactaacatcctttatgatgatgtgctgatcaggtggtttcaactggccctaatccagagtggggtgagagcttttcatggacctttgagagtcctccaaaaggccagaagcttcatatttcttgcaaaaataagagcaaagtgggaaaggtaaatgtgcaaaaacatgaactataaaggcagtgtattcatcttcaaatattttgtttctactttctatgcttcattaaggagtgtcttaagggcactaattaagaaacatttaatcggtttaattgaatattttaattactttaataaatataattttattaaatatcttatatctttgttttcttagtcagtgttttaagaacacttgtgtgcattttgtctttgtttttacacttccacttgacccctcttctgtgatttttgatgacagagtaaatttgggaaagttacaatccagattgatcgagtggtaatgcttggatcagtagctggagagtatgctttgttgcctcaaagtaaaagtggccccccgcggaatctagaaatagaatttcagtggtctaacaagtgatacatccagctggaaataaatttttggattttttatattacaccacgtgtatatagctgttgtttatttttggtcaaaacagattcttttttcataatattcttttgtaacttgatctttcattcctaggataaacactaggagcacgaagatcaggccagcttcgagtttcttgtatgattctttgcgtgttgtcaatttaaagtgatatagcgagtctgtttttatcatttttgccttggggcttgcataagtacgacttactataattatttggcactaaattgaatgtaaaaaaacagtgacaaagattgtcgtacttggagagtggatagcttggtaatcatccgtaacggagcttgtgcttacctttacttttgactgcttgatgttttagttttactctattttgttttcacacatgtgcatataagcatgcattgtactaagcaagaggtagaaccaagttaatcttgagtatccattttaaatatgctcaaaatttattctttttacagttatatttgtatggtatacagtatacagtattttgactagagaattaacgtagcataaactttctttccactcataactccaaggcagcaaacatggtgagcaaatagctggcatcatcagcttcaaatactatatacatgatatgatatgacatatttgtgcgagaaagacactgctagaatgacatttttttatttattattattgtattatagtatatgatatcatgtgatgcatccaatgaatcctaatgtgggccgtggagccatgttgtggtgtttgacaaaagcatgaaatgtgacaaattgaggagtgcattatgtataatggagggcaaagccgaatggatctaaaaaggaaaacccgactgtgaggttatgtcatgtggaccaaatagagaatccatgaatattgcattgcgttatagtctcacctaattctgtttaatattgcgtgccagctgaactttacgtatattttattttgtttcttacataacaaaatgattcactggacaactggtttacaacatttaagaggggaaaaataaccattgaaccaacttgaatgcatggcacaatgtgatgatgacctgagattgaggacaccattcacacacgtttcagatatgtatgtgatgttgacttgtattattccatttttcactgaagatgctactgctaaggtgttatgactcattctgagttctgaccttcaaaagacaaaggatggaataaattacggtttctataattttaatatcaaatcatgttgcatataattattttacatatgagaatattatcacagctatccagattagagaatatcgtaatggtgtaaaagaaacttttacattgttaggatgtgttagtttagtggaaaaaggtgaaagaagaaaaaaattggaacgattttagtaaaaaaaaaaatataattatgaaaatcttattgaacctggacgaggcctcattctaatggaacatgatacttacaaaagctgagaagaataaagtacagtataatgaagaagaaaaacatacatttcaatacttttttcccctatactttatcctaatttaacacaatcagttgagaaaagaagaataataataaaaaaacacgttcaattcaaacttaaatttttataaacaagtgtgtaagtgatcgttttgagaagggaatgggaagagaaaacacagaaagcttgatgcagcctttagctgcaccttccatccccatttcctaaagtagttcctttttcttataataagaatatagaatccaaaaagaagaaaaaaataaaagaaaacacagaaagcttgatgcagctttcccttgttagtactcttcctgcttccttcagagttcaaacatgagcatccaaaagatagaactccatttgtatgtcatgagccagaggacaaacaattaattttcttaaagcagaatatgaacaagtaattgctaattcctatccccaatatcaatatgccattccagaaactgcattccaaagtttcttttgtgttcaaggagaaaatcatcatcaatcttacagaccccaacaataagaacatataattggtctgatttttacaaaactatagttttgttttctctcttcacattatcattatcactctacataataataataataataaagtttaatttgttattaatgttgtgcttgaggttaatttgaactgttcatgctcccacctaaaagctgcccatgagggacgtcaatgttgacatctgtgtttgttatcatgatttcaaaatcacatatagtatatagtttatcctaaatgctttagcgtaagtcagagttaatccacctctagctagtggctgatgttttatatttccgccactaattaaaaagattgcattgatattgtggtattgtgatacatgtttctcttctgagtttcgacctagttactctatgttgtgagttcattggtttagtttttgtttatttttttgtttgcctttctctttgcatcctacttttcccaaaagtgagagctttatgtgcagtgttgatttgaagtgaaaaggttctcatgcagtttgattaaagaaaaaatgtttgacaaacatctatgatgctatcttatacttagagagagatttgaaaaagagaaaaaaaaattatagatgtgataggattgatagaaagaaagaggtaaacaaaaatgagaaatattaataaaatatttaaaatagaaatatgtatgtgtatcattatacttggttaaattattcaattaattgctcaatttggatcattttagaaaaacatcagcaatggaagttgttgttaccttagctttcgttaaaagaaaaaaagcgtaattgactaatcaaagctaattcaaacatgaagggattttttatttttttcaaaaagcagagattatttttctagcaccgaaaccacggtttcccctaccatcccactctttatgtttaagagaaaaggaaagacagtgcttgaaattacaaatataattagtctaacttttgaaattataaaatattattttatggtgaatgatgaggttataatctaacctcaatccgacttttgtacacaaaagaaaataaaaaataacgaatttttccttttgttgctcagtatctttttgtatagaaccatgattgattttcatggatattcactctaattatatatgccagaaggcttcaaggttacttgttctaaaatagaaatcgaattatattaggaagtttataataatttataaacatattgtttaactaacgtgttggtttgctaattatagtttaatacaactaacaaaacaaacacacacatatataaagatgttttcacaacttaaacctacaacattcaattcaattctccaccaagtcttaatcctgtcatactaggagccatttattttggagaaagaataataaggatgacgcatgatcctacttacctacatattatgctctaatttgtttaaaacaaaactagaattaacactcaccgttaattcgattgcatttcattagtattaactctaacctccaaataggtgacattgatggctttgtccatatgtaccatctatcttttaggtggaggcaacaatttcattagggcatacacttttgaagaaatggttattttaggtatattgatccatcaaataatagactaggtgaccagtcatatactagagtctatcactgtagtaatatatgcatgggagtgtatgattgagtggaaaggtatgttcatggggttggtgaaaaaagaatggggctttgttaaatcacatccattcaaatggacatctatgtatagaggccataatagctgtaagaggacaaaaccaaacagagaaaacgacatacttacatttattatgtcctatttatccatttgttgtcatgtatgttgtgtgttcgaaagttttaagagacaggcatcgggacttgctatgagtccagcgacatgaataaataaatgaaagggcaacagtattagatagttctatatatgaaaaccaattattgaaactagaaaagaaagaggttttataatgatgtatctgtaaattaagtgcaaacaaactaattaactttcccccttaggttttttaagtttgttaccacatagtttctcccgtttttggctagataaaccatagtaacggacagtacattcttagtttaacacattattcaaaatatagtatagatattaaaagatatatgctatttaaaaaaaacttaaatttaggataaaatacaatttacccctttaatttattagttctattgtatttctccccctaatttaaataattaattatattttccttagacaataactacaataagattagaatgaataaaacttataactttgtgcaaattatccaatcctcacaaagaagatctagttgaatttgttaagtaaatagtgtgaattattataaattttataaaatttatctttaatttctgttgtgattttttcccaaccctccttcgtagaccgaatttattaggttaaataattaagtatattaaaggtgtccaaatgaagcaattaattaactgaataatttaaccaaactgcatgagagcctttttcacttttgataacaatgatcaaatatcaatatatatgaaagggatgcagttttatcagaccacaaatcctttccttttctccaattaaaccttatgaaccaaaaaattaaagatacgttttttgtgctgagaagggggatcaacgaaccttccaaaacagtagacttcctcagattcttggattaaagtaatttatatacttgtttttgaattcataattgtgcaacaaccctttgcaacagctgtgctgtgtgaatgttcccaaccaaacgcgttcttggcttctgtcatttgaccaacaatttgttacataaacatatttgtaacgtaatgaatcatttgaaatgaataactcaactcttgccctcattgctaattatacttaaattgtaacagagtagctctgtagtggtattcaatttatgaaggtgaagtcagtgtgcacatttcgtcaaccaagaattcacgacaaaaacgcaaatgtggtcccacatttgcatcaagagcctaaatttaatgtaatgtgtatttggatgtcaacttcattggctttgacgtggagtgaattttagtttgatggagatcataaaagaacaaataatacattgtacaatcctccaattatgtactataaatttattatttttatgataattatataaaagtgatttgtgattaattaatactttaatatatactattttttaattaattataaatgctattttattttataaaatgtaaagaagttgaattcatttttcttctaggcttttaagagcgcggccatggaaggctccagctttacatttttcacagaatattttcttttaaaaagggcactgtggattgatttgagcctcgtacacaatctgtgttccttcatattatttttttgagatcgataattgttttcatttaattcactattgctctgtaatttaaattcaagaactttagttatacatttatcgaaagctaccattttattatattaaaaaatctcaaagaataataaaacaaaaacgtaagcaggaaaaaaaaaaaattaagtgagtctaaaaacatctttaatgggagttgttaaactctagaatttcccttcaccaaatttatcattgtacataatttagatatcttcatcatggaaattaggttcctcctcaagaaagatctccatttcaaaaaaacaaattaatgtctctctccggatcgattgtgatatccacaagagtggttcaagaattaaatatggaatttatcactagaactatttttatttttttttacatcttatatgatattatggagactcataaaaagtaataaaaaatttaaaattgattttctcactaaaaatactctaaaagaaaaaaaaatataaaagaatatgaaaaaacatgatatcggcctaaaactcgattccatgaacattaatatactcttcaaattgaaaattatatctccttttggctttatggtcacgggagggaaaatgagttttgatgtgaacagcgtaagaattatttttctctctcaatcatttccatgttgttccaaactcagcgaaatgtaacgataatttagttttctttgcctttttttttctttatcatttgtcttatagcaaataaagtactagtgagagtgtgggacatgaaagaaaatagtttgaactttgattaaatgattaaaatgaactctgatacgcttcttatgtataacaaaatagatatcaactacgtacgatggtatttttagtatatattgttataaatgaatgcatctcaagcttttgcatgtcatataatgtatacatgtaatatattttaattttaatttcaacttacaccagccatttagtaataattgagtgttatttcatcaatgtttctttatctattttcatgacccctttaaaaatactagttctccgataagaattttctttttcatttaacgttaaatattaagagattttttttttatgaccgttccattgatgcacaatattataagttttgataataattaatctccataaaaatttgactaattatctttactaaatgtttcctttcaactatttatttttttcatttacaatattcaaactacacacttgaaaaatccgagaaactgagttcaattgagaacccattatatgaactagaattaataaatatcagccagcaatgttttgttttccggttatcctaagacaaactatccaaggcaaaatctgggggtacgaaaaagtgttttgttttctggtgttgtgggggccaccacctttgctctgtttgaatctgattaaacgtctctataagtaggctgtatgtaggtctgtgaccccctgtaagtaaaagatctcaaacgtagtatacaagttcttcccagcacagagcagagcagcgttattttatttatttattattattacaaggtaaggaacgaatccattttttttaaagaaagaaagaaagttccttgcaactactacttcttttttcgtttcagagctggcttccttctgtttttcaatattaatttatccgtttttatacattcaaataagtgcaattatattccattaataattaaagtcatgtacaaactgttatacacggagacgaaagaggaaacaaaagggtctcggataagataattaaagtgacagagagatagaaaataataatgttgtaaaaaacattgtacgaagttgtagtggtctctctagaaaatgatcaacctatgtgctgctatatatatatatatatatatatatatatatatgctcccttgcttcactcccatcgaagttcttttgtgacacactcaagaagtttagtccactaatcaatcttgttcttatattcatattcataacatacagaaatgggagttggaggtacattggagtacttgtctgatctaatgggcagtggccaccaccaccacaagaagaagaagaagcagttccaaaccgtggagctaaaggtgagaatggattgtgatggttgtgagcttaaggtcaagaacgctctctcttcactaagtggtgagttacataaattgttataatgatctattatctatttatttatcagtgttattcaacatgaagataatgaaatgaatggtgattaataattgcaggggtgaaatctgtagagataaaccgaaaacagcagaaagtgacagtaactgggtatgttgaaccaaacaaggtgctgaagaaggccaaatcaacagggaagaaggctgagatttggccctatgtgccttacaacttggtggctcatccatatgcagttccttcttatgacaagaaggctcctcctggttatgtgaggagagtggaggcccctgcgcacactggaaccatcacaagatatgaagacccttacatcaccatgttcagtgatgacaacccaaatgcatgctctatcatgtagacaaaaaaaaaaaaaaagatgttttttcccatggcactgtaaatttataaattttaatgcagtgttttttttttttttcttttagatttttcttctttctggtctattttcaagttcttgttgctttcctagagtgtcgtcttcttttttggtttttacataaaaagataagaagagacgttgctgtgatcattgtttttcaatttttctgcttcagtgttccagattgtatgtacactgtacttgcctccttgtaggtttgcagtaggtagtttcggtgggccttgaccttgaccttgagatatgatgttatttctttgttgttatttatggtcttcttttctttctcccttatatgaaaccggtttgggagtaaaagtaaagcatcaaaacaaccatatcatgtgaattaagccggtaagggtgaaataatggtgaataaaaacaacgcctgcttgtaatttatttttctgtttgcgtgcttagttaaagagaaaagtatcaaatacgtattattagtggaggtagagggtgaaaataaaacaaaacaatgctataaatgaagtcaaagaaaggaccaagaatataattgttaaaatactcaaaattggtcgaagttacaggcattgatcaatttccctgtagactgtagtatacactaacattcgtattgcattttgcctaccccagagcatttggctccccttatcaccaaaaaagaaactttgatagtatgcattggcattgggactattgttgatagaaaaagcatacataatttaaactcaattccaaatacgcttgatttccagaagaagctggagcaaacaggttcaaggaaggcatatccttttcctctcaattaacgtgaggcaggaatcggctttactttttctgctttgcctttttctgtttccctctccctttaccagatcctcacaaagtgtaaaggcacatgcaacctcgggatagtataaactatacaggattcaacagaattatgcagatgattgttctccttattattatcaccacccccaacgtcatcatttgtaagaagatattcaatggtgcaaaatacggatacggatatacacaattgttaaggttgaaacaattcatatatgctttccaatctcaaaatcagtcaatcataccaactggtgagcacaagaagattggggtgggtgtaacatttatttggcatttccaaattggagagacataaattttagatttaaaaatttgcgctacttgtataaaatataaaggtctaattacgatcaaaatgcattcacagtgaactattactgttcagaaagaagaagaaatttcagtttggccatgcttatgacctagtgaaacactaagatcgagccagtcactgagttagctagtgtgtaccagggctaattagcctaataaattgaaccagacacataagcacaatttgcatttgagaaaattacaaattaggatatctttatgaacatatttctaattttagatggattacccccaaacggatgattaatcaagtcagcatagaaaacgtcgttgaacactttttaagttttaactactaatcctgttgaccttttgaaattatgattctccctttgcatttttctgctctaagcatacagagccatgcctatttcagacaggaaggtgaaaagggtaaaacatatcatgtaattgagatggcatttatcatatgaagaattaataaatttttatcattcagagagcagtattgaaaattacatttacactaaagatacacaagctgctcgcatgtcatgtgcagaaatacacatgaattatctaatatatatatcaccaggagggattgctcattactctcaaaagggatatccaggtcaatcatgtacaactccactaaccaggaacagtaacttgaggtagccgtaatctggaagaagattctgccaaacaagttgatccacattctctagcaaaatgtccatttcgttgctctataaactataagaaattagaattatacctattttagataatccatgccagagataaaaagaaaacatactgtaagtgtcaccagtatcattttccccttatactataggaagatatattgaatttataaatatgctggtctacttctacctgccattagacatgtatataatcttaaatcacccggtcattaaacaacatgttgtaaatttcacaaaccctgtgtctcaaataagagttgaaatattaagcagcctatgttttaactatgatctcttgtgtcatcaaattttaatgttgcttattagatataattaataacaaccgattaaactactaaagcccgtgatcaatgttttatcaagcagttgctacatacatttgaagttgttgcttactattttattaataagaaagccaaaattttaaggtgccaagcatgcagaaagtaatccgaacacaataatacgagtgattgactaccatttcaaccatctattttaagaacataaatattctaaggagatctggaaactcaccccatccatctatgattcatatgatgtcaagtcatcatgccccttatgtcctgggcgacacacgtggtacaatggacgggacaaaggatcgcgatcccgcgagggtgaactaactccaaaaacccgtccttaatttggattgtaagctacaacctgcatgaatctggaatcactagtaatcgcctgttagccatacggcggtgaattcgttccaaggccttgtaccaataattaattcgtgatgtccacgttctatggagatcatcgaatccataacaataagtcctgtttggagaggctctctgttccccggataaatctcaacaaaattaatatcatacagaagagtggcattgccgggaatattgcagtcacctattgaatcagtggcaaacatgtcaaaatctaacaaatttaatgacttaaggcatcttctgataacattcacaatacacttatctaaaactcaagtaaggaactagaaaatgcatgtcccctgtgataaaattaaccaatgaataatgatttctcccttctctatggtgtctattctattactttataggtgttgctgattgttgaaagagtctttcaatgtttatgactaaattggataatatagcaattttccaaaatgcgatgaaacaacatgagaagcaccctgcaggttcagggctatatgctaattgcggaggaatctgcagtttgcgtttcccactggggttaaaaaggtaaattagcaagtgacacgtgtcatgattaaagaatcttaaaatgcccaggtactccttcaccccctaaaatcccctgatccagtcccctgattaccttgactcaacacactctcgtaagttgcaaaatagcaaaactatgttacagaatactttaggataaaaaaagtttatataccttgcccacaccaatgcgcatggtgagaggtctagcacgtttatagctgctatcaaatactatcccatcagcgaatctcgcaatatagtgaacctgtagtgtatatatttatgagtaatatacacaaattaatatttatttttaaacatcttatctaacaccttttattttttttactcataaattttattatacttatattttttttctttttctctctctagatataagataatagtgtttatcaaacattttcctatatttatataccattcattcataagtaactacctaacatgtttgttcgcatgctgacactgagtgagtgagtaactaacattgataagctaaccaagtggagcttcgtcaccgaagccctcagcaatgtcgcagtaaccgaggccagacttaacatagtcgtactcacacaaagggctctgttgcgtagtattcgattctcgtggcgtccgcatccaatgcagttaaatccatcacacaagccgtcacaacccaataccgattccaaccaatggattcttattatcattgtgagctgcacatgacaccttacgctctttgcaactcttgccatttggtttccaaaaacatgaaggaatgcgtacgcaggagaaggaggagagtgagagtgccattttccttccagtttcacgttatctatatctctattcaactctttgtatggctcactcatgatatgtgaccccaggcatgggtccaccttgagccaacaattaacggtatgtttttttcttctttttttactattattaaaagaaataaataaagtatctttatttttgggctacaaaacttggttaggcaaaagcccagaatactaataattattaattcataaaaaaaatcaagaaagttctgacctctaacaactacgtaactaacaagcacgcttccccaatattccctaacgaacttctcaaaaccgttgtgttccctccctctccgtcactttcacccgcgcgcttacatataaataccactgcacctcctcactcgcttcatttcccgcgattttcactctgaaatcgaatcatcacttcttcaatttcctctccaccatggaaaactcatctttctctcgacgattcgcgctcctctgcgccgtctccttcgccgccatactctgcggccccagggtcaccgccaccatcgaaggtttcgaagctcccttcgctcccttaactcctccaccgcctccgcccgatatccacgaacactcgttcttctcccacacggcgctccttcctccgatcttgtctcacctcggcttccacgagctcgcgacggccgcgccgtcgctctccgacgccgctaccaccggttccgttccctggaccggtccttccactatcttcgctccttccgacacctctctccgcacatgcttctcgtgctccgttccaaacctcctccgcgaacacatcgttcccggccttttcaccatcgattatctccggaaactcgctttcggcactaagatcgagaccttgagtccaggccgttgtatcaccgtaacatccgatacgcttaatcggaacacgaacaacaccgccgcgaaggtattcctcatatattaacttaattatagatctttcagttatttagttcctagttagattcagtattattttctctcgagtttaatttttttagttatatttccatgaacaacaccttcgcgaaggtatttttcagttattttcagtagtttgatatttcgttcctctttggcgaaggtcttcgtcggaggagtggagatcacgcaaccggatctgttcaacaacggcatggtcgtggttcacggccttcaaggtttcgtctctccgttatctccgttctcttgcgacgtggagaggatgaactcgctctcgtttccgttccatccagatcaccgatccggtcacgctcagcatcatctccaccactccaacagcgccacgacgcagcctgctgctatgatgcgcctgatgctccgagacgcgatgctgaggctccgcaacaacggcttcaacatcctcgccctcgcgatgaaagtgaagtacgcggagctcgtgatgctcaacaacttgaccgtgttcgccgtcgacgacctctccatcttctccggttcgcacgcgtacatcagcaacgtcagattccacatcgtgccgaaccattacctctccatcgcagatctcgagaagcttcctgtcggaactgctctgcccacactggagagaggccagtcgctgctcatcactacctccggcggaggagagaccttggcgccgatgaggattaactacgttagggttaaggtcgcggatgtgattcgcaacgtgaagatcgtggtgcatagtgtgtatttgccgtttccacatattaatcctgtggctgcggcttatgacagtatcttaggcggtggcgaaggagcatcggaaggagcggggaatattgcagattctgcagagcagaggacgcaagggacgtgttctgttgttgacggacgtggaagttgcgtcttgcctccgatgcctgatcaggttcaggtcaaaccaatggtggagatcgaagaccaccatggcctgtgaataatgccatatcttcatccacgatgatcttttctgaaatgaaactttgtcacatttgtagttagttcactctgttaatagagatgttagttctctttagtttgtctgtgtataggtgtgaaatgccagtgttgtttagtttgagcgcttgttttgtattcagcatagtcaatactgttgactgttgttcttcaatagaaaaatgttgagtcaaacttcacaaattttggcttgtatccaaattatctttgtttcttttgctctcaagtctcgattctcatcgcagtgtgcttattgacctgaaaggttctcttctaatttgacagatatttgacatgtcatttatttgtcctgaaagtcgtttggctaaatgaatcttttaaatgtattttatttattgttgtttaaattttattaaaaattatagattaaatgacttatttagttctttatttttttgaaaaattcattgagtattttatctttttaatttgattcaaaataatccttccatcaacctaaaactaacatcattaatcaaataaatattttgaccactaaaaatcaccaataaatataaccttttcttttcacttctccttctaatcccttttcataaacaaaaatcatcaatgaaaaataaattattcagataatgaataacaatcttaaagcatgacaaattcaaagttggacactaaaattacaatcgcatatatgtcaaagttggtgacgtcgaagttatgatgcaattaaaggggtgtgaaagtcgtaaaaacaaacctcaaaattgcgacagatcgacactctgtcatgacaaatttgcactccatgccatagatttgcacttcgccatgacagatatgcaaaggactttttgactattcattgacgacctcgggaagattcccaataagatgattttatattcaaaggactttttagctattcattgacgacgtcataaaaatttccaataagacgattttagttttcctcctctgacaccaggaagatgtttgtgtgatgatgttttagcttattgcaaacatcaacttccccactgaccccgccaggcaaacacccttggatgttgtcgccaagatggtggtgcgagaaatggtggtggtattgcaggaccaccacatgaatgccaacgttcacaccgtggaaggcgtgacccctttggacatccagagaaccctaaccttgagcttactcttggacaatcccacccatattgaaccctagcccatgttaagaagaagagtataactaagaaacacattgggacggctaaaaaatcgctaatatttttaaatcattaacaatgttagtttgcaatagtcgaaataactaatttgaactaatttaaaaagataaaggattaatatgaactttttaaaagataaaaaatcaaattaaaaaaacaaaacaaaataaaggactaaacaggtcatttgatcaaaattaaaaagaattgtgagtgtgtttcttatttaatgaacttataattttatatttttcaatacttttttataataaaaaaaatactatgttagagagtgttattggcacgtactctccttttattatttccattttggttaaaatagagaggcatggtaaaaggataacgttttttaatttaagataataaaaaagtcgccacttttaattttgaagtagtatagtttaattctttaaaaaaaaaaaacaaaaagtagtataattttaatatacattctcaatttttttttaccgtaaaatgccgaactgatgaaggattcacttacgaaagtataggcctttcctacgtagcgacatttttttttccattcatcaattatatgccgatactggttgggtcaatcccagattaaatttgaccttggtccaggtcaaattcaatcttagaaagaaagtcaaccaatgcttttgcccagccttaaagagagataatccaagaatgcattaactttgaactgaaaaacctattttgggctagctccatcaaatgtttgtttcactagctttgctagtgggcattctacaagttaacatcttgaaagttgactgggagaatagggagttacttcctgtgcatccaaatttgcttcttgcacctaattcaaaatgtaaaattatattttgaattagtctttctgagaggttaaaagaatgcatgatacaaaatttaaagtgcacgaagcaactgcatgaagagtgagacctaagtgtatgattggattaaaattgtgagagctcaaaagtatttttatttcaaaaataataaattaacctttccttctcaaattatgtattagaatgcattatttttaatggaattcgtaaaagtatttttgtaaaattgaactaaatataataaaagtttataatgctaagttgaaggcttagtttactctaaaatgcttagtttataaatgttatcatataacgaccttatagagactaaaaacgttctatttaactctgtaaaattataaacttataaaatattttttaatttgagatataaataaaaatgtagatttttttaatgtgaagtcatgtaccttaaagaatgcctttgaaaaatgtaattttgtagaagataatttgtatagaatatgtgttataaaaaatgatgacaatacatattgaaaatgatgtatagaagttgagctcaaatgaaattagctcctctatcaaaaaataagaaagggacagactgtgtaggcatattcatatatgtaagttgatacagaaggtagagaccaagaaacaagaaaaagaattttaggagtgatttaatttgagaaaaaatgttttttttaattgtgaaaatgctgacttattttttaattttaattttagttttgaataaaaaataaggaaaacaacttatttattattttcaaactaagtttgtgacagaaaattcatagattgaaattttgatgtttttcttacagcgtgttgagcaacatctccccgtcgcttgcctcgtagtttcctttgcgattcagtaatcagtatatggttttgacccccagctagcctgtgctgatctagaaaagtacaagttgtaaattatcatgaattgatgtccgagatttatattaatatatgtttttagagcctgtagttgtaaaaggaattgtagagagtgtagttttgcactgaataaatgtttttctagcttttgtttagttctgttccgttttggaatgatggaaatgtccgacgagtgtcgtcggaagcgttgttataggatcggactctcccctgtcggtctatagtgatgagaccaacgactgaagagaagatcacaccgacacggaagcaattggggtgctgtgtgtgccgtgtgaagggaaagagagagtcagaaaagtgtaccttgaggtctggagggttgtatttatattgaatcaagggccttgggcctcagctcatgaatgacctatttacggacagaataataggaaataatggcaagatatgattactagaattagagttattgcatacctggtaaaaaggatctgattaccaatcaggtatccgaattgattgagatggattctttcctttccgtaacagatgtcccccagctcggttgattagcattctgatctgccgagctgtactaattacttactttcttcggagtttgtaatggccgagatgagtgggttacttcggagtttgtaatggccgagatgaccgtttgggacctgggaccttgtgaagcattgagtttcgacttcgtatagggccgacctcgtataaggccgaccttgtacagggccgaccacgtgtgagggatccaagccgaggtagtcgatatccgaggtaaggtttgcttttgccccttgccgaggtaatcattgttgaggtgcgacctttgcttttatcgttctgccgaggtggttagtgtccgagttcgcttttgcctcttctttccttgcagtttattctggtgttttatttgctctttgcttctgtgtcttttgcatactctttctcttttgcgtatcgtggctccaattgttgagcgtctatttggccgggaccattggtcgggcgttgaacatatttggccgaaaccactggtcgggcgttgaacatatttggccgggaccactggtcgggcgttgaacatatttggccgggaccgttggccaggcgttgaacatatttggccgggaccactggtcgggcgttgaacatatttggccgggaccgttggtcgggcgttgaacatatttggccgggaccgttggtcgggcgttgaacatatttggccgggaccactggtcgggcgttgaacatatttggccgggaccgttggtcaggctctaaacatatttggccgggaccgttgatcgggcgttgaacatatttggccgggaccactggtcgggcgttgaacatatttggccgggaccgttggtcgggcgttgaacatatttggccgggaccactggtcgggcgttgaacatatttggccgggaccgttggtcgggcgttgaacatatttggccgggaccgttggtcgggcgttgaacatatttggccgggaccactggtcgggcgttgaacatatttggccgggaccgttggtcaggctctaaacataattggccgggaccgttgatcgggcgttgaacatatttggccgggaccactggtcgggcgttgaacatatttggccgggaccgttggtcgggcgttgaacatatttggccgggaccactggtcgggcgttgaacatatttggccgggaccgttggtcgggcgttgaacatatttggccgggaccgttggtcgggcgttgaacatatttggccggaaccactggtcgggcgttgaacatatttggccgggaccgttggtcaggctctaaacataattggccgggaccattggtcggactctaaacatagttggccgggaccattggtcggactctaaacatagttggccgggaccattggtcgggcctgggatctttgtcccgacttagcaactgttagcgtatttgtaacatcattataagtgtaattctttcggccgacccgatgattcacccatgatagttacgtcggcttgatcaggaccgaaatgatacggaacaacgactaagcattcaaatctgtgcacagtaattttccttataacaaggattttattaaatttcttcgaagattacatgattttcatgatctcaatgactgatcacacgggttgtaccttcccgagttatataatcagctaaagagaaacacatgatccatcagttataaagtcctcccatgaccccaatgatgggcttgacagccaactaaaggggaacacatggtaaggtactaatccatgatccctatgacgggcccctcggccaattaaagggaaacacatggtgtccacgattccgatgacgggcttgaagccaactaaagggaaacacacggtgaagttccgtgatcccaatgaccgactaaaagccaactaaaggaaaacacatggactttcttggctgcatccgtttgacttgcttgtcgtctggtgtcttcattaagtatgctctttgcccatgattttggacaacccattgcggttctttccggcctgctgctaactttccttgcaccttggtcggtctcttaccgatattacctgaggtatttctaccatgatgacgttgcattcgaactcgggctctgagaagtcttcgtcttccttgctcctcttatcatctcgttgtttattctcctgctgggcttttctcttcccgtggtgtccttgagttcggatcacgtactgtcgcagtttgccttcccgtataaatttttctattgcgtctctgagctcccagcactggtcggtcgtatggcccggtccattgtgaaaatcacaataccgggaataatccaatccttctctccttactatcggaggaggtcggttgactttcctcatgtcggtgaaggcgacctccttccatatttggccacgcgggacggtcaacggagcgtaattgtgatatttcaactcgtatcccccgggcctggagtgagggtcgggactgctccgtggtggtcggcctgctggatgtcggctggatggtccgacctggggattcttctgtcgtcggttccaaggcgaggaaggttctttgttttcccctggtgccgagtttgcgatctccatttgttctaactccaaatactttttagctcggatcctgaactcattcagggatttgaccgggtccttgtagatcgacttggcgaggcgggacgttccgttgagcccggcggaaatgagatggacgtgtactctctcctccaggccttgtacttgtagtgcggcttccttgaaccgatccaggtaactttgcaatgtttcttcaggctgctggcatatcttgcctagagtgaattccgacttcggctgtttcttgctggttgcaaagtttaacagaaacttctggccgagatcctcgaagctgcggatggatcttggcggaagggaatggaaccaggtctgggcagcccctgttagcgtggtggcgaagattcttgaaatgataggttcgtcgatgcctcgaacgcacatctgcatgtcaaattcatcaatgtggacctgtggatcctggctcccgtcgtatttggacagaaacgagccgtcaaagtcttccaagaactgagcatccactattcggtcgacgaacgggctattgttttgatgacctcgacggtactttcttcgatatgtgccatcgccatgatcgggtcggcggatggcctctattggttcccttgtagttgagatagcacggaatgtcctttgctgaggatgtgatcttcgctcttggtcggaatggtacgtcggttccctattgcctgtctcggcagctcgggtcggtgtttcgggcctttgtcttcttgccttatgctcctggtggtcggtattttgccgacgttcttcctctcttctcttgttactgcgttcttccaactgggccgtgaggtgctgcctgtcttcttgccgctgaagctcataccgtttctctagattctccatccgggccaacaaagattgtaaggcgttttggataaaacgttgggaggtctctgggtcgtcttgtgctgccggtggtgtattggccggcacatgcgctgctgatctcgtacgggaggaatcggtgtgggacaatgcaccctcttccaccccattctccgaattcggattcctgggtggttcttcacgtctggcgagctggtgtcttctggtattagccattgagagttcgtgggattcgaaatttatcgtccccacagacggcgccaatgttccattctggaatgacggaaatgtccgacgagtgtcgtcggaagcgttgctataggatcggactctcccctgtcggtctatagtgatgagaccaacgactgaagagaagatcacaccgacacggaagcaattggggtgctgtgtgtgccgtgtgaagggaaagagagagtcagaaaagtgtaccttgagaatgtctggagggttgtatttatattgaatcaagggccttgggcctcagctcatgaatgacctatttacggacagaataataggaaataatggcaagatatgattactagaattagagttattgcatacctggtaaaaaggatctgattaccaatcaggtatccgaattgattgagatggattctttcctttccgtaacaagttctatagaaaaagtgggaatgaaagggatgaaagaaatcacatgaaaatgaaagaaagtggaaacttagtgggtcctatcttactaaaaaataccttccgtttccaactacgtggaaaaattatatactgggttaggttaatttttgtgtctaatgcaataataaaggactggattgagtaatactagcaggaaaacatatgcagcttgaattctcactttctctcgattttatttttaggcattttcattggtgatatatatatatatatatatatcttaaagggctttcattggctaataacaagtaaactgtattgaaaatcagatccgttattaaattgctgtaagcagtagtttatggtttattagtttaattatagttcaatagagatcaaatcaataatatatatatatatattaaataaacatttataaaagatgtatgttttctttaatatgatttaagatctagagttagttttcttaaaaaaataacaaccctgattttagactaatatataaaaaaataaacactcaaatcaagagttaactaatatttcactatattttaagtacctattttaagagtaattttgattagactgaccaataacaaaccaaactcaaacattttgcaaagcaattctaaggcctattttagaagcatataaggaaagaatagaaacctaatatttcatttgtttttacttaactttgataaccatcaacttctgatttaattaacaaccttgattagttatcgatggatgtgccaaaagaagaatataataatatatgagaaactccttcaagctttctttcttctttatctcatttcctctctctctctctctcaattatgcgatcgacatattccaaaatttaaaaacaaaaatcttcagttactccagcgtttcatcgatgcaactaaacttgtaaagaaaaccacattaatcattcaattaaattcttaaaaaacacacacgtatcttcatttattttgtttatatccttatgatcttcagtattattaaaaatagagcatgttgccctcatcgttttcgaaaacaaaaaacaaaaagagtacgtcgcccacaaggaaatttcgatgcatgcgaaaaaaaggagcacgtcgccttcaaggaaataacaatgtatgcgacttgtatataaactatatattaaactttccctttcgagctgaacgcgcttgcagcattcctagcctaataattaactcaacacgtattactcttaaaaaaaaaactcaatacgtattataaaagtgaatgtatatacaaatacaaagtatagtttaatgtacgtatatataataatttcttagagtgaagctttaattttttttaatgattttaacttataactaattcttaacaagaatatttgcataaatggacttggtcttgacaaagctggtcacttaatgaaatgtgaatgtttaagcaaattcacgtcaaaaagtatgaaatgatgcaagattgaatattttatgcttaaaaaatgacgtgttccagacccctggctctaacgcaaaatcaacacgcgggaactcattgagaagggaacttcagataatcatcacaggccggaacttggaacaaatcacgatgatcaaatccaacaaaaacgtaccaataaaaaatatccaacagaaatgaaaaaaaaaataactgtagaatatatttaccccgaaaataaaccttaaggcaaagtagaaagctaggtttcataaaataggttaaaacatgtttattttatatatttgactcaaaattttcgtcgagtcgatcatttaatttaaaacctaaactggagtcgaataaaagttcgttataagactatattaatttaatttataaatataaaatatcaatcatagaaatagagaaatctatatatatataattaaaatatattttacaatttatttatgctatgcattaaatttacccaactaaagtcaagaatcctagttaaacaaatgtgaaaattaaatggtaatatctatatttattgaaaaatctcatcagatttttaacaactagcagaggctagttgactataagttcggtgactctctgatgagttgatcagagaggcatgctttgggaccaaacactgtacgtaaagctttctagtttctagagtctggaccggtgaagatcaaatttacgccaaagttacgataacaataaatattccaaatgatatataatacttagaagataagctcaaatgcaagtggcttctcagtcaaaggaatacgaaagggatccattaatgttatatgtaagcaaactcaaagggatggaaataaattgatgaatgcaagttggtactagatggcaagtggcagaccttgatggaatcgttttagccttctcatacacatttgacttcttcttcttattttttttttaattttaagattttttttcacaccttaatttattacctgtagcttttggttcaacttttttggtgtatcataggaatattcttagtcaacaataaaaaattaatttcttcgacttatagatataattaaggtaaaatttgactttttatatatttttttttatcatttaaaactaaaagtattttttctcgaatagaataagattattataaaagataaaagttccttttttgagtattagcacaatccttttttaatataaacaattaagaatcgaattgtaattaacatacttaaaaatataccggacacacgattattttgtcaattgtactcgattttgttgatttttttcaacctttagtaatatattcactagttaattatttttttataaaataaatagtgagtatttcattctttaagattataaacacaaattagtgcatcaactgaaaaaaaaatctaataatttatcatgctataatcaaggaattactaacacaattacaatttacaacctaatgaaggcacaatttgtataatacttgcacatttttcgttaaaaaaaatacatgtgacgataattcttttggacacattgtaaaaagaattgaattaaactgagtacaaactaatttgcgaagaaattgaaagaaaaaacaaaaagtatgtttaattatggcctatgaaaacctcttgtttgaccacaacccatgatagatgaaggcaacttcccaaccctctcaaccccttcttcaaaaaccactcccatccccatatagaagtgagactctatatggcaatgaaaagcccacactccaggattatccgtcctaaacctcaatgcggtccaaccaaaggggtgcaccggaaccgtgttcttcataatcgggttctccaaattatactttctggtgtcattgttcacgtcaaactttcccttcccatacccaagaacccaaaaatcgtgcccatgaaggtgccacgggtgtgtctcgctattgtttttgttcatagtgttggcgttttgaagtataatatccaccgttgtgttgaacttgagcctataaatgccactgctagacgtcgcattcgcgttactaaccacactgaaaatgtcgtagtttgcaaagtcatagccatcagggggtggagtggggtcaaacgcgccggttatgttctctttgagggcaatgaggtaaggggtgtgagggagtgtgaaagagacattgttcacagaccaatgccggtattcgcttatgttgttctgcgtgttgaggagtactatgactctgtccgaggttgtcgggggtttgagtatgtacccttggcgtgccttgatggaaaggctttgtgccagccttggctcaacgtcgtcccaagcaggaggagaaggtggaaccgttggaggagaacgtttagggtggttggggtagtagttgaacatgcccaacccgggtggggtggttctgtttctgcttaccacgtttgaggtgatccaatagttccttgatgggtcttgatcggttttcactagaaccgagtaggtctcacctgagtatatgaagaggttttttacctcaaatggctctacatagtgaccatctgcttcaaccactatcatgttatggccctgcattataacatgtcagaagttatgagaagggggaaagaataaagtaataagccgaagaataacattcttttaacacattaactattttgataaacttgaactgttggacataagaatgagttgtgatatttcaacacccttaaatatcaaacatctcatcaacataatttatttttatctctcttttcttatcatatcacataatctattatctggatatttctctctcttctctctctatttatgggtttatgggtttttgtatgcaaagatttttttcctaagaatatacagaaaaagaaaataagaagatgaaattaaatttttgtcataacttaaaatcaacttatatagctcactctttgaaaaagttatatgacagaacttaaaagttgaagtgtaagttgacctttaagtggtagaaactttttcattaattttcctctgccttaagagtttacaaagaagtttatctaaagagaacatttgattacctcaatttggaagctaagtgctgataaagcagtcaagctagcaattctgagtcggtatgtttttcccgggatcacagtttgtacaaagggagagcattgagggtttgatgtgtcacaaacatcagtgcttaagcttggggaattagagcagttgaatcttccttttccatgaatcagaagtgactgaggaaccaaatatacacaaagaataaagccaaaagttagataattgaaaaaagaaaagaagagaaaaaaggagggtagattttgaattgaactattaatttacctgaggttctcccacccattgaaagggaattgaagacaatccagcagcttgttcataagtgctcttgtggtaccaatcgttgaggataatgcttcggtcaaggtcataagcaaagggttcagggtcacggggtgccacacgaatcatcccatatagccctgcttctctttgcattccatagtgagcgtggtaaagatatgtaccaggctgtcacaacaaaggtgaaagtaaattagatactataaattgttttcatgatgagatgaatggattacaaatatagcttgttctgatttcttgctatttttagaatttagattagaagaccaaacaaaaagtaaggaattaacacaattacttgtgtgggttaatgtcagttaggtttttacaacttaccctgtctacaacaaactgataaataaatgtgtctccaggcaatatgggacactgagttaccccttctgttccatcaaaccaaggagttccaatctggccacatacacatgaaaatgattaatcaataaacacaaaagaaaaaagtctatattttttaatattcatattttggggcagaaaataaaaaccaacctgtcttatcccgtgccagtggatggaaaggttttctgtcactaaactattgttaacttgaacaacaatggtatcaccctcctgtgcctggatggtgggtcctggagttttgccattgattgtgataaccagcttcttaaagcaatcaggggacctaaactcatactttacctcccatttgtgatgtctaattctggcctcagctttgtggaaattcccgaaaatgaggaagaaacacagaatcaatagtgttggcaattgcagagctcttaagcttaaccgaagctcaaccatgcctagctagtcaaagtatatatgtcttacactgagagaggcttatagagttatagtttagagatattaatcaactttggtgtttgatgtgtggagccaggattgcctttatataatggatgagcactgtggaaatttgaattatattatatgtattgtattgttggctccgccttttcaaactaagttctacatagaaatctatcgagagtgaaattttgactttttcgcacggtgttgaccatgacctagctccccctttgccttgcctcaaagtttctccgtgattcattatatggttttgttttgactatctctatgtagattggaaaagtacaagttgaaagttattctgttttgatttctaacgttgatattgatgtgcttttctatataaaaaaaggttgatattgatgttttcattgacattttgataatacttttcctttattttcttaattacataacatattttatctcttttttctattttttttattgtagaaattaataaagtttaaataaatataacgttactcttattagtcttatgctcatagctatttaccaaacttttcaagtttgacagctgagattcttccaattaaagaaacaaattatctttattcttatgacaactttaatcatgtaaaataaataaaaatactaaatatttagttctttaaactcgtatatatatgtgtgtgtgtgtgaatattttattttccccactgtatgagtttttttgggctgtagtatagttttatttaagtacacacatacctaatgatatttatttacaaataaaataaaatcaactctcttttgcacccatttagaccatttttaattagattcttaagatgagtttttaagctaaaaaatttctcttagttagatatatcactagacatgctctcaagttctccaatataaaggttgaattctagtggaataattctaaaaaaaatcatctttttaatcaaaagtagtttttaaatatctttttctttaattaattcataaaatatattcaagtgagatctattatgaaacgaaaaaaagcttgagaatccaaagtaaaatttatcattaaaataagaaaataatattacattttatatgacatcatataatccataaaaaataatctgaaaatttaaaatgaattctattactctttgaagtctaaccatgcaaaataggtgtagccttataacttgtattttattagttcttggcttaaaaaaaataacaatcttttttttatgctgattttaataatacccagtcctctatttcttaatccttacttagctatcaatatatataccaaaagatgaaattgtaagcatctaattcgaagttctttcaaaactctctctatctcttgcttgcatctttctcttctttaaataatgacacagtgcgtaattaagaaaacaaaaaatttcggttactctatgtttcgttgacacaacttgtaaagtattttttattagtacttgtaaattaagtatactccataaatcattaaattaaattcttaaaaacacaagcacggttcttatcttcaatagtactgttaaaatagagtacgacgccctcaaggaaatcgcaagctcgcagtatatgtgacttcacttgcatataaattatgaaaaagtatcctttctgaatgaacaccggaacacgctttccacataattatattatatataatatatacaaggaaacaattgaaggaacatataaaaaatttatctttctcgaagtcaagtagtaatttttcataatttaacctgtaacttgttatgatgttcaccacaacccataagaggtttgatattcaaagatgagtagagagaaagagcagggagaaatagagaagaaagtttcttgtatggattcgtgtatatgctaaaatgagcatagtcggttacattcaattagtgtttccttatttattgttgtgagtaggaccctgttaccacgtgtcaaactcttatttgtgtctgttgggccctgtggtcccttaccctaaaactgagttatagcattggtctaatctttgcaatagtttcatgccttaggcctattttattttcattaattacctgtctagaatgatttttgtgcaatttagctgggatttatttcaaaacagttatttttgagtcgaaattattttgaagaagtaatatcaattttataagtaaaatgaatatttaccttgaaacataactgattcttaacgatatcaaaattcttttacacaaattgacttaatctgtctggaaaatctcagtcaaggaacccaatgtgaaaagaggaacttcagatcattatgaaaatggaagttgttctggctagggataattggaaacaatcaggatcatagaatccgacaaaagtgtaccaaaaaagtgaaaacaactcaacagaagcaaaccaaaaagaaaataactttatgacagagtggaaaggaaaaagaaaagatgattaagaaaaaaattactacttgacttagagaaagataaaatttcatcggaacacgctttccgcataattatctcttcattcacgagttaaatttgcttctgtaaaaaaaaagaaaaaagaacgcgcttcttttatcttgtatatatggaagtacgtttatacgagtttgcgaatgtcctgagatgttgatcgcactgtagccatgtggatttgttaactttatgttcctcttttaacatgtacgctccaacataccatgggaaagttgcagagacagactacggaaggaacaacatttttccacattttatttatattaattatattctcgtttgaaaacaaaatagaatataattttagtcttaatttttttttgacagatttattttagtcttataatgtgattttaatctttcaattttttttattgattttgaaaatttaaaaatgttatatttttaataaaatatttctatcattacttaataatgatgtaatatatatatatataatattattacaatcatgtcgctttaaaatagtaactaatacaacataattatatataaaatatatataccatgttaccattaaaaagataataaaaactattaaaacttataaagattaaaaataaataaacttttttaaaagataaacctaaattaaatcatatttaaatctgaaaatgataacaagctagctagttatgacttgtaagtattgtctgcacggtgagaaattattgtacgtgattgactgaccttctcaagtctaagaacggtttagatgcttaattactgggaatcttcgctaacttgggcctctattaatattgttgtgtaaactctaaatactgaagtctaaggagctattttacggtgttttgttttttgttttacaaataattttataaatagttttaaaaacaagagattgaaaaaaagtttagattttcacattaatcatatattcatctcacttacggtaagttagcagcgtaattaagcatcatagtgagttggggacagagtaatgcgttgcggtggttcaaagttggatccgctgatcatggagttttgaggcaaagacacgagctaaatttgaaatgtatggttgaaggcaaaatgggagaggatgtatccaaactaatccaaattatttggattagatttttttttaagagttttgatcaaattccatcttatttaattaaatttatgcactgttgggtaatgaattttttaaattccatctaaagattaaattaattattaaaaaaacattaatttttaactaacatgatttattggattattaaattaaattatccatattttttcttttttaagttatttttcatctatggcttgattttgtttatatttttttaagttaatagtctaatatagtattttatttttatctaaaataaaatatcatattagcattaaaattatttattttattagataaatattgtcataatttagtcatttttattacatttaaatcattgtatacttacataattttagacaaaaagaaattattatgctaaataattttagttttataaaaataaaataattaacatttaaaccaagttaactcaatcctatccaatctaattatgacttatttgatttggattcgatccgttaataaaattatataaacttaatttaactcaagccataaaatttaaatcgggtcgagttactaatttaatcaaataccatccaagtggacccggaaacaatctggagtcagaagcaggggctaccagcaagcacgagtgtacacatcttgggatggtacatcttgtgatcaccaacttgacaatgacaacaaccattctccacttggttagtaggattgcaatggcaggatatgggcgggtagggccactaccggagcagattatttgagccttattaattgtgttttttatatgatttatgaaaattaaatacacaaaaagttctacatgtatacaatggatcatttcagcagcaaaaacaatattacaacagcagcagcagcagaaaattaaatttagttagagttgtattactgaatttgaaaaacaattaaatacaactgtggtgcattacaaagaaacatccggaggtaagactttcgacataaataaaaattgctatccaatacattttagtagaaactcaactatatattttatgagtttttcaattttcattttataagttcatcaccaccacaaaatatatacatcatgttgctcgttgcattggcttcatacgtcatcctactcactgcatccctcagtatcagacttaatgcatttgctggtcctgcaaacatcaaacctcaaataatcaaataacggccaacatcaagaagatggtaaaaaaaatctattgttgcacccttgagaagatggtaaaataatcaaataacgcccaacatcaagccagcattgaaagggtcacaccattttatgttgaaacgtgatcaacattcacatgttacaattttgtgtcttgtcagagatgcagctgcccagcaggttgactgaaactattgatattgtattagagcaggagtttttattaaggaaaagtatatattattgaagatggctctgatgttagggggcccttgaatcgattacattatgaacgtaatccatgtgtaggatttgatgggaaaacagagcaaaataatgtcatgagcaatttactaattggccattgttccatttgcatatattaccacattggtcattggcattgaagaatgaagagtggtctctttgctacgccgcgaacatttttctatttatttttatatgataagaagttataataaataagtatacatttacaattacataaaacttaaatgaagaataataataaatcatttaaattctaacagattttttttagcaattggtgatttcatttttaaaaaaatattaaaattaaatataaagatagagataaaaagatgtagtcttagcttgtttgtgtctctctctctggtaccattgcaccttgcaccctatataatggagtagtctccctccttcatctccatgaaatccttcaatcgtcattcattcatctttgattccgccaccacgcaaacataagatggcaacggcaaatgcagcatcctcattccaacaaccacccatcaaatcccacattgctgtactccctagtccaggcattggccatgtcacacccctgcttgagctctccaagctcttcgtcacacaccaccactgccacgtcaccttcctcaacgtcaccaccgaatcttccgcagcccaaaacaacctccttcactcaccaactctccctcccaacctccacgtcatcgatctcccacccgttgacctctccaacatggtcaacgaccaaaccacaatcgtagcccgtctatgtgtcaacctacgagaaaccttgcgtcccctaaacacaatcctcgcacaactacccgagaagccccaagccctaattattgacatgttcggaacccaagtttttgacaccattctcgaaaacattcccattttcacgtttttcactgcctcagcacacttgctcgccttttccctctttctcccacagctggaccgtgacgtgacgggagaattcgtggaccttccgaacccggttcagatcccgggctgcaaacccatccgaaccgaagacttgttggaccaagtaaggaaccggaaaatcgacgagtacaaatggtacctccatcacgtgagtcgcatgactatgtcaaccggtattttactcaacacgtggcaagatctagagcccgtcaccctaaaagcattgacggagcactctttctatcgcagcataaacactccaccgctttaccctattggaccgctgattaaagaaaccgaatcggtgacagaaaacgaaccggagtgtcttgcgtggctcgataaccaacccgccggttcggttctgtttgtcacgttcgggagcgggggcgttttgagttcggagcaactaaatgagctagcgtggggtttggaacacagtggcgtgaggttcgtgtgggtggttcgggtgccgaacgacgctaatgcatctgctgcgttttttaacgcgggtggcgatgatgatgcgacgttgtatttgccggaagggtttgtcccgaggactcggcggaggggtttggtggtgaggtcgtgggccccgcaggtggcgattctgcggcacgcgtcgacgggggcgtttctgtcgcactgcgggtggaactcgacgttggagagcgtggcaaacggggttccggtgatagcgtggccattgtacgcggagcagaggatgaacgggacgacggtggaggaggatgtgggagtgggtgtcagagtgagagtgaagagcactgaaaaaggtgtggtggggagggaagagatagagagggtggtgaggatggtgatggaaggggaagaagggaaggagatgaagcgaagagcaagagagttgaaagaatctgcggccaagtctttacgcgtcggaggaccatcctatgagatgcgagcggcaatggttaatgttttgcttgattgcaagaataaatcgttgcacccaaaagcccgttcagagggtggatcatgaaactgaaatcaaaggttgaaaattaaccaacgtgttttcgcgcgtgctctttagccgaatcttcctacaataaaataaccgtcacgtttagcggtttcggtaataaataagtaaattaaatttttctacatgttgtagtaagtggcagtatgtttggtttccccgaaaagtactcttgccacctaggtttagaggtaaattgggtttgcttctccaaaccttagtttagccacccacgtttgtgaaaaacaataaatgtcatcagcttcctattttacccactcatcatttcccaactcctcagagacttggattttcaatggtgatcagatggtgttcgacggaggttctgctaactcattgtatttgggtgtccttttgtttgcttttcgtattcgtttcgggatctgagtgggaggaaggcttctaattattgttggattcgtcactctcgtgtgttttgcaatctagtcaggtttgccttggatgaggtgatttatggccatttgtatacccctccttttctccttttgttctttgcttttaacgtatgttcctgtttttgggtacatctgccacttcttggatttatttataatatatttgttttttttgacaaaaaataaattgggatgctattcaaagagagcctataaaaaataatattaatattacattatatatttcatgttgtaccccctcgatcttctcaattgtaccaacaaggaccattttcctacactaagtttttcatacttacacactcgaaaccataagattatgtaccccctaagtcttaccaatgacggtcactttcctacatttaatctctctgcgattatgcactcgacattgcgtagttgtgtatccccttggccccctcgattggtttctgcccttcagggcttgccaattaatatcatcaaattcgaaccaaccctctcatacttccaattgagcactccactacaggcgttgatcaatccttagccattaaatgaccttaatcgattatgatgtgtgcccaaggatcttgggataatggatagaatcatgtctgatagcacttgtaagaatatcatattggtcaatgatgaggcatccctatataaccctaatgcttgacctagataaggcaaattatgcttaacacttgaatgctcttgaactaaatctccttcctaggtacaatctatttacaataatacataccattttcaataattaagcatttaagagtatttttggtagtattattataaaaaatatcatttcatcaaaatactttatttgagtgaagaaatattctaacatatatgtgtgtgtaaactcttttttattttattttatgaaacttaagttcaccaactttaatccaacacatacatgcaacggaatggttgtaatgatgcactcaatattctaaagttctatccctaatttgactttaaataaaaattgaaataacctttgttataataatgataataataatgcacttaatatttgattaaccaggtgagaatttttttcgaattcaggttatttaagtaatttactttttataaaaataagaaagaggagtgtacttaataaaaaaaatgaaagtggacatagtaaaacgttttttttttcttgaattgaaaatcaaatgagctcggcccattagcaataattggacccaaatgaaattttatctcaagaataactcacacttaatcacctattactttgttatttcaattttttgttttttctaaattattgtttttgtcctttaatttatttttaaaatttgatttggtcctttatctatcaaatggttttatttggttatataatttttaaaaacgttccatctaaattgattctaatgacgttattatatgatcatggttatttatataggatatttttgacgctttgaatgttcaaaataaatactaaagattgaattaaaagaaaaaagttactcatgtttttattatccaaaaataattaaatttaatatctctttaatactatataagtgttacaatgtgagtgtcagaaattacttttaaaaactaaattcactattcatcttgaagatatactttatatgatatccaagtgatcaataacatcgacattttgatattaagagtacatatactgtaagtataaggattaaattctagcaaaaaatttccatgaactttttcaacagagttaatttatcatatttgaaattaaaataaaaatatatatggtccactcagtgtatgttttacaatttgttggtggaacatgaaaatgacattaatcaatatatatttttctttcttcattcatctgttagatttgcattgaaagtgcattgtaccaaaacaaacataccttaggcgatgaggttgaaataaatgaacttagactctattctcattatcgccatgataaagaaaaaactatcctaaagattatggtcataattttgaaaatgagaaaaaaggccaaagaaggttgatttgaatatgaaagcggagagtttcaccaactctccccaccccatcctaccaaactccctctacctaccgttgttcaaccttctccttctcatcatctcactctttctcattcttcagtaaccccttctctcccaaattctctctctgtctctctctgttcagttttcatatggccaatacactatataacggcgccacatcccgaatccctctccgggaccaatccctggccttctctcgccacctttccagatccctctctttccttcccatgtaagttctctcctctcttcttccctccaatttcacttcacacaccaatttctctttctcacccttcgcagaacacgtgcgggaaaacaacccaacgcaattgcggttaaggcttcttcgcactctgacttccacgttgacctttcgctcagtccccgtgtcaatgccgtcaagccttccaaaaccgtcgccatcagcgaccacgccaccgctctcgtccatgccggcgttcccgtcatccgcctcgccgccggcgagcccgatttcgacacgcccgctcccatagccgaggttttctttctactttccccctttcattcatgataactacgtgttctttttttaatactgtaattgcaggctgggattaatgcaattcgtgaaggttacacgaggtacacgcccaatgccgggaccatggaactgcgccaagcgatttgtcgcaagctaaaaggttggtttcactttcattatgtaataatgtgcttttcgtttggatgattgtaagagatgagggttttgaattgcagaagagaatgggattacttattctcctgaccaggttgtggttagtaacggagccaaacagagtattgctcaggcagtgcttgcagtttgctcccctggagatgaggtaagtaaaaaaaatagtttatgctttaactccatacgtaagcactagagaaactgactacttatatgcttcattgtcatttatttggctaggtctcaatggatcatttaatttgaccaaacctgtttgaattattcgaatttgtctatcatttgcttgcagaaaatctttgatgatttgtctggttgacaacggtgccagacttgtattatcattcttcaatctgtctcaagtttgaaattagttacttgcacttgtttgttcaaaagattcttcaactggcttttcagcttctaaagcttttgctctatgtttgttttatgtctctggtagtctgttataattacttttgttgaaattaaataatgttgtttattcttttataattgtaccatgtttatatacaagtctgagagactcatcaatctcataaatttagggactaaaatcaaggattagaatcaacctacgtatataaaagtaatagaaagagagcagaatttccctatttacataaatagacaatatttccctaattatacaaaatatgtcaataacattcccacaatatctcgactactttgttatcaatttatcatttattcagggtccagtaatatgcttgctgtggtaaaagtcacaaataaaacagccactccatactacatacttccatttattaaattatgtctgagttgttttggaaagcttaatgcttatcacatactccatatgtttttttctcttttccttttgctcacttcagtggctttcatttatggcgtgagtatttcaggttattattccagctccattctgggttagttacccagaaatggcaaggttggctgatgcaacacctgtgattcttccaaccttaatatctgataatttccttttggatcccaaactccttgaatccaaaattactgaaagatcaagactgcttattctttgttcaccatctaacccaacaggatctgtctaccccaaagaattacttgaagagatagcccgaattgttgcaaagcaccccaggcttctggtatagttatacatccatgacaagatcacaagtacttcaatgttttcagcctatatgatatttcctttcaagatcttaatagttgttttatgcaggttctctccgatgaaatttacgaacacataatttatgcaccagcaactcacacgagctttgcatctttaccaggaatgtgggacagaactcttactgtgaatggattttctaaggttagtctgtaatgttctatttctgttaagagttgcaggatgtattgttgatccctcattcttattttatactcaattgcctattctttatttcatagtgtgagtagtaattttagactgatccctcattcttattttatactcaattgcctattctttatttcatagtgtgagtagtaattttagacatgacatgaaggcctccaaatttgattgacacttttgagctgttttcctataggcctttgcaatgactggttggcggcttggatatattgctggtccaaaacattttgttgcagcatgtggaaagatccaaagtcaggtatgctacattttttattggtcactttctttcgtaagccttaccctatacatcatacatgtcttgatttccttttcctacagcctccatgacatcttacagattcttaagtttaacagattcagtatttgggaggaaacttaaaagaaattttctagcctaaacatttggaattagttggattattattgctggttcatattatatgctgtatatactggctgatgcatcttattgaatttagtttacttcaggggccagtagtatagctcagaaagctgcggttgctgcattaggactaggccatgctggcggggaggcagtttctaccatggtgaaagcatttagggagcgaagggatttcttggtaaaaagttttagagaaatagatggtgtcaagatatctgaaccccaggtgcaatttttttttttctttttccttaaataattctccttcttttgttttgtctcttccttttcatgtctgtttttctactcaaacataatttttctctttttatccgcagggagcattttatctattccttgatttcagcttctattatggaagagaagctgaagggtttggtaaaattgaggattctgagtccctttgtcgatatctactggatgtgggccaggtatatgcatgtaatggctttaaagattttagtgatttcatgagcaggaaatttcaaatggtcttgtattttacggtattgcctataaatagtcgagagttgttagcaaaaggccaaaaagtatgttctcacttttaaagtatgacccaacaagtgagagtgaaagttatctggaaggtgtcatccatggtcttttacagttaagcttagaccatcaatatgtatacaaagttgaaagagagaggaaagaaacatcgtatagttgaacttttaatgtctcactactcataagtcataacattgtcttttgccattttggcttacaggtagccctggtgccagggagtgcatttggaaatgacacttgcatccgcatctcttatgcagaatcgcttactaccctacaggcagctgtagaaagaattaagaaagcacttgtaccgctgagctctgctgcacttgtttagtgtcgatgttttttcgttgttatgcgtgtattttatttcggcaatgtgtaatctgttgattctgaaaataataagctttggctacttttccacaaatgaagtgatacaactgtcttattaatggtttaaaattataataacaaaattgtcctccttttttatgttacatatgttgtctcgaagcgaaggggaagcaaataaacaggcgttcgatggctacaatctgaaaagggcgtggtaatttttaaagtagaatccatgaagggataattttctcaggcaagagtttattagctagcactaataaaactatggaatatttgaattagccacaatcaaagtagcattgataactctggctaatggtaaatttcatgtttcgttttaggagagattgaatttgtggcgactccatctttgctacttttaacaactgcatacggaccctacgctgactagtagtacattgcgtttttgttttttttgttttttttttggtttatcaggggatgtaaattgtgaaaagtggtgcgtgtgtctcatttcatacagaatcgaaactgatccaacgaaacaatgaagtacaccccctccctccccctttttggtcaaaaaagtatacccctcaagtcgggccttggaagcaaggcttccatgaaagcccattaagaatagtggatgaaatggaagcccaatatgcccataagttgtaagccctgtaagatgtttcggccttcaacttttttttttcgggcatcgaggaagatgagttaggcttgcaagcgtaggcccaaattaagttaattaactggttgggaacaaagacgtggatgagttgattaattgatgcaatttgcggcatacatatgcttgatttggcatagaatcaattccaagataggagactgcttgacctaccccacaaccgcaagttttccaataggtagggacgtaaggttatggtctcattagaagtttcctgttggaaaggcaatgcaacaacacatacaaaaattaagagcgtgggagggaaggaaggtaagaactaagaaggaaaggcaattttaactctcttaaatattcccatctacaccaaactttaacattctccagaagctaaggagctcccattccccttaatgcaatcttgcatagtgacttcaacttggagacaatcaaccttcatacacaagaatttggttttcctctgcatgcacttttctgtcccaaaagtaccactttcccatctaaacttcatctatatatacatacatatatatatatatatatatacatatatatattaattagtaaacataggaaaccaagttggagagaagcaaaaaaaaaaaaacaaaaggcttgtgagttgtgatcatggacgtctcttattcatgcaatgaacaacaagcacccgagatcgttttctttgatttggaaactacagtgcccaaaaggagtggagagcgtttctgggttctggagtttggtgctattgtagttacactccacaaactcaccgagattgagagctacaccacgctgataagacccaaagacctatctgtggtctcagtgaaatccagcagaagtgatggaataactcgtaaagccgttgaaaatgcaccatcttttgaagatgttgcagacagaatattcagtatcttgaatggaagggtgtgggtggggcataacatccagagatttgactgtattcgaatcaaagaggcctttgatgatattcataggtcagcaccagttcccgttggaatcattgattctttgggggttctaactgacaagtttggaagaagagctggtaacatgaaggtatgtaagaaatagcagcagcaagtgattcattcttcacacaacaaaaacaaaatcctcataattatttcaagttcttaattgctgttattttttatgggcagatggcaacactggcttcttattttggcctgggccaacaaaaacacaggtacacatttctaactctagtgccaaatgcattgtaatattgtattaatttgagtattatatgtgcatgagtttaattttaatacactaaccaatttttatatgatattatatagtggcttttgtaaaatttgagtgatgtggatatatatatgactattttgaagcaggagcctggatgatgttcgcatgaacttggaggtgcttaagcactgtgcaacggtgttgtttctggtgtgaaattaatctccatgttcaattctacctggttacttttgaaaacaaatattccacctagcagcatgattctcacacgtttgttatggcttatggatgatgttaggaatctagtctaccaaacacattgcatagaaaatggtatggatcttccagcgttatgacgcgaagcagaagcaatgggaaatctccctgcaaggaagagactagcagaaaatctccccaacttcatatggatatcataggacagtcccctatgctaggggaagtttgggaaaggttttattttatatattgacataatattagattttcaagtgcatgttcagtatacattatttttggaaatatatataacctcaaatacatatagtataatgataatggaaattctttaaatgtaggtgaccgaaagagtgaagggatttttgtgtaaagcacaagggcaaccaccacttcaacaactactcaagcattctcattcattactgttatggtcatcctgtttagatcacgtagatgttatagtttgggcctgggcccaattgtaatggatgatcgtgcaaataacttatccatggaacgtagaggctgacttggtccatactgaacgttgagaacgtgctggatgaggccgggaatccaggaagcagtttcagtacccgttacgaggtaatctaccaacaaatacacattaattcctggtgaaaggtacacacattctaactttctctttcaattacacagagcacacaccccacgtccattggtgtatctctgtgatcttctgcttcaaggtatcattctccattgatatccttggacttgcagagttagagtgatcaaatagcaaacacgtagtactttcgtgctacacagttgtgttctggaaatatacagaacattggcgccgtctgtggggaacaataaaattcgagtccaacacctttcaacaatggtaaacacaagaaacagccactctgtaccacattcagagatgccgaacagggagatttgcctaccggagaatcagaacgtggcacggagggaagaagtacatgtgacgaaagctgtttccgacaaggcttcttctcccgctcagacagaccaacagaggactccaccagtgcgaaggatgggccaggagggggagctcggaggacaactcgttagcaatgtcctcaattcaatcctaactcgaattgagaacatggagaaatgacaaaatttacagagacaggaagacattcgaaacattactcgccaaatggaagaacgtaatgaggagtggagacttgccgaaatgcaacgaacggcacaattggaacagcagctgcgaatgatagcagaccgagtacaactttcaaatcctgaggaggagacgcaggatttgaggatgcacctgaatcaaaggagaagtactgacccggaagatcaaaggcggatagaggagccacaagatctgaggacacacctaaaccaaagaagagatgccgaaccgggagatcaaaggaggatagatgagccgcatcggagtcaaaaccgggcacagaatgaggcacgagatggagtctacacaaaccagagccgtgacgaaaacccgaatattcgagcaaaacgtgacgacaatcccactgatagggcaaacaatgaaaggatcccgccagacagcggacatgataaggcgggagagcagaattttcgcgagaagacaggaccagtatatcgtcggaaatatagcaggggacagcaaaataatagtccattcgtggacgacatcgtaaatgctcgatatctggatgacttcgatgggtcattcctatcaaagtatgacggaacacaggacccgcaagtgcatatcgacgaattcgacctgcagatgtgtgtccggggcatcgatgagcccataatatcgaggatttttgttacaacattaacgggcccggcgcagacgtggttccacacgttaccgcctaggtcaataaaagatttcgaagactttggccagaaatttttattgaatttcgcaactagcaaaaagcagccgaaatccgagttcacccttggcaaagtcagacagttacccggagaaacgctgcagagttatctagacagattcaaagaagccgccctgcaggttgatgggctcgaagaaagagttcatgtatacttaatatcggctggactcgatggttcgtcaagatttgccaaatccatttataaagatccggtgaagtctttgatggaatttcgtgcccgcgcgaagaaatacttggagttggaacagatggaggtcgtcaacaactcgggacgaggaaaagagcgtcatgaaaggagaagcccacccccaaaaaataggggatacccggagagtcgagctcggaataatgatccaaaatctcgaccaggaagatacgaaaacaaatatgacaaatacactccactgaacgtatcccgttcacaaatttggaaggaggtcgcacttacagagatgaagaaggttgaacgaccccgcccgattttcaacagggccggattggacaagtcacgattttgtgaattccacaacggacccgggcacaccacggatcaatgttgggatttgcgggatgcaattgagaagttcatctgggaaggacgattaaagcaatatgtcatccggacacaaggaaggaagaacaaacgaaagggagacgagaatcaaaatagagacgaaggaaagagaccccgagagggcaatgatgagttcccagaacccgagttcgaatgcaacgtcatttccggaggcatgggcggtggcggggatactgccactcaaaggaaaaaatatctgaaggaagtgttatcggtccaggcacaacctaagttcaaaactcggaccggacaaccagaacctccgctcttgtatttcacaaaacaagacatggagggggtggtacccggacatgaagacgggctggtgatatcggcgacggtggaaaattgccaggtaagaaggatgtacgtagacaacggaagctccgccgatataattttgttgaatgcatttcggaagatgaaattggacgtaaaggaattaaggccgtgcaaaacgatgttgatcggttttaatggcggcaacacgaacgtaatgggatctatccgcttgcggttaaccttgggaacgagaaaagcctacaagtcggaagaagtggaattcgtcgtggcagattttccatctcaatataatatgatattgggaagaccaaccatacataagtgggacattttaatgtccacaaagcaccagaaactcaaattcattggcagcaacaggcaggtggtaaccgtatgcagtgatcagaaagaatctcgacaatgttattacgatacggttcgaaaaagtgaacgagaagccaacgacgacgttcataattatgtacgttcagtaaatgtggtggaattggatatgcgagaagcctcggatgagtggaggtcggaaccagtggagaaagtcgagcagattctgattggagaccaggtcggccagtgaccagcattggtggaacattggagcccgaacaaagggagcaattgatcaaatgtctcaagaaaaaccgcgatgtattcgcatggaaggcgtcagagataccaggcgtcgatcccgagttctgcagtcacagattggcaatgtacccggggtcgaaaccggtggaacagaagaaacgaaaattgggaccagagagagctcaagccttgcaggcccacattgatgagctgttgcaggccggcttcatacgcgaagtccaatacaccacttggttatcgaacgtcgtaatggttcgtaagccgaatgggaaatggagagtgtgcacggattacacagacttgaacaagatgtgccccaaggatgcatatcccatgccgaacatagaccagctggtggacaattcatccgggtacaggatcttatcgttcatggatgcattttccgggtacaatcagatcgcaatgcacccggacgatcaggagaaaacggctttcataggcgacaaagccaactactgctataatgtcatgccgtttgggctcaagaacgcaggggccacatatcaaaagatgatgaatagagtattcgagtcacaactcgggtgaaatatcgaggtttatatagacgacttgatagtcaaaaccgcgaaggttaacgagcatgtcgaggatcttgaagaaacctttggccgactacgcaagtttaacatccggctcaatccgttaaaatgtacctttggagtcggggccggaaagttcttgggctttatgttaacacacagaggaatagaagctaatccggataagtgccgtgctgtgctggatatgcaattcccgaccagtaagaaagaagttcaacagttaacgggtagaatagccgccctcacacgttttatgccaaaatcagcagagaaggcattgccgtttttcaagttgttgaagaaacaagctgtcataggatgaaactcggaatgtgagaccgcctttactgacatgaagagatctttggcgtcgcccccagtattgtcaaggccggaagcaggagaaatattggtcatgtacttgtcggtaggcgaagaagccgtaagtgcagtcctagtaagagaggtggagtccacacagaagccggtatactttgtaagccgagcgttgcgcgactccgagttgcggtatcaaaagttagaaaagttggttttcgccttgatcatcgccgccaaaaaactgcgtccatattttcagagccatactatagtcatacggacagatcagccaattcgacagatcttacataagccggacttggcaggaagattgaccaactgggcaatccagttgtccgagtttgatttgaaatttgaggctcatcatgcgatcaaatctcaagcgttggcagatttcatccgagaactcaccccctacaccccgacaattggggagtggtggactctatacgtggacggatcctccaacaagaaagggagcggagccggaatcataattgagaatccggaaggagtagcaacggaaatttcactgcaattagatttttcgacgtcaaacaaccaagccgaatacgaagccttgatcgccgggctcgtacaagcaaaggaacaagaagccaagaacgtgaaagtttacacagattcacagttagttgcatctcaaattgaaggacgatatcaagtgaaaggtcccttgctggcaaagtacttgagccgagtaaaagaattgatatccgagttcggcgagattatggtcaatcacatccctagagaagaaaatgcccgggccgatatcttgtcaaagctggcaagcactaaaaaacccgggaacaatcggaccgtgattcaacaatagacgttacagccgtcgtgcataatgatgatcaccaccgacaatgattggcgacgaccaatagtaagttatctggagaaggggactttaccagacaacgagctagaagctcgacgtttgatacgaacgtcgactatgttcacaattattgacggggagctatacagaaaaggattgcatagccctttgttggtatgtgtggccccaaaccgagtaggatatatcctgtctgaaatacatgaaggtattaacgggcaacacatggggggcagagcactgacaagaaaggcactccgggctggatacttctggccgacaatgagtgcggatgccaccaagcacgtaaggtcatgtgagaactgccagatgcacgcttcaaaggtattatccccgcctgaagaattacaatctatttcggctccatggccattttataaatggggtgtggatcttttgggtccattcaagtcgtcggaaggacagatgaagtggttgatagtcgccgtagattattatacaaaatggatagaggtgtctcccttggccacaatcacttcggcccgagtgcaaaaattttttgagaggaatataatctctcaattcggaattcccggagaggtggttactgacaacgacacccagttcacggacaaaggatttcaagagatgatggctagctttcatattcgacaccggtttgggtcggtagagcaccctcaatccaacggccaagcagaggccgccaacaaagtaatccttgaggccctacggaagcggatgcacgatgccgggtcgacctggatagagcaactatattatgtcctatggggaattcgaacctctgtccagtcgtcaaccggggagaccccatttcgaatgacttacggaaatgaagccatgatcccagtcgaagtcggacaacagtcatggcggcgtactcaaatgctgcgaggcggagaggtctcaaacaatgagatcttggcattggagtcggcacttcttgaagaagtccggacaacggctcacgcccgagaattaaagataaaacaacagatggcgtatgcttataacaagaaagtggtcccgcgacagtttgaagagactgacttggtactgcgacgtgctgacatcggaaataaaaacgctagggacggaaagttagcagccaactgggagggcccgtatcgggtcgttaaaaaattagacaaaggagcatatatgttagaaacgctccaaggcaaactagtcaagcgaacatggaatgccgacaaattgaagaaatattacagttgaagtctcgacctccctttttaacaggggtacggattcggaaaatgttacatccgagtctatatggtctatgtctaccgagggtacacgaggcagtagaacgatgtaatctcgttatcgagggtatgggttcggaatacatatatccgagcccatatggtcctttttacgatgaagacattgctaataaatacgaactcggaagcctaccttctgagcacattattttcattgttttgaataagttatatcgttgtaatttctaagtgtcagtctgattctattcggacacacatatgcgacgaatataaatgcaagcattactccttatcatgatatctttattcacgattaagtaatgactttgaatgagacgttcaatgcgaatataaatgcaagtattattcggatacatataatcttcgtgatataatgacgactttgaacgataagttagatggtcttgatcaaaccattaatgggtctatcccttagcgaagtcgttcatagtcaagttattcgcggaatacaaaaaggataaacggtctttggaaccaaaagatgcacgcgcaagatattgtatgaatcaagtaaagagcttgagtaatatataaatgggctaagtaattgttccgggcaccgggcccaacaaagaaaatgaaatacataagtaaaaaccggcatcccggcccttcagttttgtggaggcagggcgtcagtagcaggttgcaacggaatggcatcagagacagggtcggcaccagacggggtggcatcaacggaagcagtggcaccaacggaagcatcaagagtaggttctcccattgccaaaacttctgttgtagccgccgatgggtcttcagatgcaggaggggggaagagttgcccatcttcgacatacgccaagaaatgcatcccgacagtagtcatagctaccctagggttcaaaaaagtgatctgttcaagggcgttgttgaagccatcctcggcagcgtcacgaagggtctccttcatagcagctagccgacccttgtaatcccggacgcaggcttctttgtcggccttggcagaatcgagggacgaagtcaagagggccaccttctggtcagcagcttcaagggaaccctgagactgcgccaaatctacccgcagggaggcggaaacggcttgggacttaagcaattcttccctcaaaaggttaagttcttccgccgactgcgtttgaagggtagcaaattgagccttaaaggaaacaagttcctcaatagctttatctttttcctccaccgcaaccccgtacctgcaacacgaatacttagaaatatacacaccatataagtagagataaaatgtcatgaggagaacacatacctttcccggacagtggtaagtgctcgagcaagagaagcactgcgaaaggcattctcctcgatccgaaccagttcggccagttcttctcctaccggggcccccgatttgagcatgtatgcagggggtttggtcaaacgaaccaactcttcagtaacccctttcttccatacattgtccgagcgaacccgcatctcaggatgctcggagtcagcagtaggggtagtacgtgggcggccacccgccacggtaagatccacggtttcgaccaccgaaaccggggtcagagttgttgaggaaagaggcagtggaacagtcggagctttcgacgccgttttttgggtaccttcgtcaaaaaacgccctataaggagggggaccacgttttttaggcggagcgccgagcttgtcagttgccggcctcttgcctttgcccttgacctcggttggcttggaaaggtggccgacatcagttttggccttaggaggaggtcgtgatcccattccggctacaatcagaaaacattacaattaatacaagtacaattataaactgagataatgcagttatcaaagcagaccattttgacgaccaccgccaatgtagttagaagtctgaggctgaccgtgagtgtttataaactcagaaatcacgaaaatagaagaagcatccgagtcggaaagctcctcctcgacaaaccggtagttggaatgatcctgtttgtaatgatcatccgaccagtacaaaggaaaaacccattccacatcagatgactcaggtccggacaagaagaagggttgctgatgaggttccgcggcaaccttaaagtacttgtctttgaagccccggaaggagtctgagaagggatcgaagagttttcgcttactctgactacgaaaagaaatccatcctttccggtcagaaggttctttacccgttctacgggtatgaggagagtagtagtagaagaagagaggaactgtgcaagggattcctaaatccgtgcaaaataattcaaaagtacggataaacccccaactatttggatggagttgggaaggggctacccggaggtgatttaaaacttcaatctcaaaggaggaaaagggaaaggtaatacctatttgagttatgacatcttgaaaaaagaagaagaagttgggattgttaccctcccgttgagcacaaatcggctcaccgggcaggggagcctgaagggcgaacccatcttgcttccctactggggtcgacactatgctgggtaggtcgaggacagaagaagtgcgaaggatttcataagtgacccaagggaacttagacgctaatgctaggggcacatctgaatgggactctacagaagcagactcgtccatagtttccgaagtagcacccattatacctacgaaaatgaagtggggaaataaaagttagcaaagcgtacctggaggtaacgcattaaattcacaagaaaccgaggccgaaaccccgtcgacgacagaacgagtatgcgatcccggttgcaaatccttggaagcaggacgcaaaatggggttatgacgacatgacctaaagatcgaatcagcaatgtcgttggaacctatttgaacataatggatggccgcggatacacaatccatacatgcatcatactcaacctccattacttcaaccgaggacgaggaggattcctcatcggaagaaggagagaggccatctggagggttagggtgacggcaagagagtcctaaagaaagaccttgtggactaccagtatcaatgttgggcccaagaaccgaagagtccaaagaagataaagttctagaagaatctaggcctaatattgggcctaagggttttggcttagggtctacagaaaccggaagaggcaggggaaatgaaggggcggaaccgccgagagtggcggtgatcttttgttttccagaggaggaagaacctccggtgtgacggcgaagggggtcgttttcactttcccccgccagaagtggaaggccaaacaatagccaagcggctctagggccaaactttttccttatctctgtctcctcttcaggggtcattctcagggcaacttaaagaaaatcaagagggaatcgaagagaaagagaatgatatggttacaaaacgcgaagaaaaacccagaaaccaagaaaagtcagaaagaaaatatgatgcaaccctaagaatcttgatgctggcagagtcacgataatgcaaaaacactaaatgatacagaaagaaaggagaaagaaggtacctgtggtaatgaggaattgaaggctgattggaagaagaacgaaaggggaacttgaagaaaatatgagagggtgcttgaaaagttaatgaaagagaagagaggaaataatagcagaaaataggcagaagtgacaagcacaagaaaagtaggcacgaatacgcaactttgaagataaaaatttgaaaatgtgatggtaacttgcagtaaccgccagaaggaaggaaacggttcagtcaccacaatgaaacgacacgcaggggtatcatggtaaaaacacgtccaattgtaagggcaggaaagtaaagtcgcgtcaatagtaatcattaccaggcgaatgaagtgatagaccctttaaaggcatttattgccattaagggcggaaaaagtaattgatttgaatcaggaaggtcaacagccgtttcagatacgtcataaacaacccgggtacattactcgtccaaggcaaatccgaccacatctattcggataagttctgtcgactatacatttgattatatttatatccagcataacctgaatacttgcgtccacaaaagtctagtcggaaatgtttgtatatccggatattcacatgattttgaaagtagactgaataaagcagagttatagaaatacgtctccgaacgtttgaagaacggtgcccggatgaacgtggttggataagttgtccggaatactgtggatgggagatgatacccaaataatactctgcacgaaggaagccgactaatcgtagtcggattaattgtagtcggattgattgttaccctgaagcctgcaaatcacctgatgcatcccgactgccaagtatacttggtaaccgggctggggggcaactgttatggtcatcctgtttagatcacatagatgttatagtttgggcctgggcccaattgtaatggatgatcgtgcaaataacttatccatggaacgtggaggctgacttggtccatactgaacgttgagaacgtgctggatgaggccgggaatccaggaagcagttccagtacccgttacgaggtaatctacctacaaatacacattaattcctggtgaaaggtacacacattctaactctctctttcaattacacagaacacacaccccacgtccattggtgtatctctgtgatcttctgcttcaaggtatcattctgttggatatttgttgaaccctttatgcataaaacgatttataaagttttgatgataacaaataatgaatgtcacattattagattaatggcaatgataataattatttgatattttgaagttactaatattttggatttgatattttgaagttattgatattttgaatttatgaagatcagcataattgataagat

SEQ ID NO: 34 - DNA, 1000000 bp, Glycine tomentella
tattgacatatcaactaacatatatttattaaaatttaaattaaataattaatagtatattaaaaattcaaaataatataaaaaattactcctataattataaaatataaatataatatttgtgctagtcatgcgacactaactaattaagttagtatggtaagaaaatacattcatatataccaacttcagtacatatataatataattcatcaatttccttaaaaagatattcataacctaaaaaatttgtccgaaaacactcctatgaaaaagaaaagagaaaacgcatttatttaccaatttcatgtacacaacacattcgattatcatcaataaaccacgaatataaaacaataaaactggtgaagaaatatgtaaaattgaattattaaatcttaataaatttaattagaatggattgacaatataaactataaatataaataattaaatcgatgacgacatatgtaaaattacagtattgaatattttagataccatttttaatgaatttaattataataatataaaaacaatttattattatgctatataacataataataaattgttttatattattatatattcatcaattgatttttaattttaaattgactattttaaaatttatatttaaaatatctaattaattggtacaatatttttagaaagttaaatttttggatttaagacaagacttaaatttaaaatcactatccgctggtaagaacaattcggtctacatattcaatgatgtataaattttagattgataatatagcataaaagaaatatataacggggattctatatagctttaattagtgcatgatggtgagttaataattgattaaaggaagagagaaatcacattccaattaccccgatatattccccaaatcgccatgccttttcactgtttagtttttagcaacacgtacgcgaatattttcttgcctctcgtcccttttcggtggttttcttctctgctattattttccaccatctgtcaacaatcaatcaaaacaactaaatagatggatacccgaatagctgaaaaagatatgtatgagtgtgtgtggatgatcgatgagaaaaacgagactaatcaaaggttaagaaaatttgaaaagtaatccccgaagaaagaaaagaagaagaaacaaatatttggtcaattttttatgtttatttatttttgtgttgttttctaaggtgtgaccatgctgtacgtaaactgctaaagccaaattggacgaatgtagaaaggtacgtagaacaaccatacgaggcgataatgcaattattcgaatattcccgtactactatttgaaattaattatatcatattatgtatggaagataatttttcaatttcctcacttgaatttcttcttttgtttttgttcaattttgttttcgctttgttcccgagaaggaaactctgtcacaggtgatgcacaccacaaatatttagagatcaagccaaatttccttattaatatatgatgcttttacctaacctaaccacggaaacaatttgaaattttagatgcttcaaacgcgtgataagacagcactaactatatcatttactaatttttttagtattgttttgcagtttaattttttttaaaaaaaacttattaattacatttaaaattaataatagcaattaacattactgttataagtcactcagttgtaacttgcacgttcacaggctagctaaatgatcaataaacttagaagaaaaacatacatgctggtcaagcaaagtgtcaacttacaaacccacggtttcatcttaattaagaagaagaaaaaatacagccgtacgagctagaaatttaatatactttgggttgtggaatctatttgtatttttgttatatgaaattgcataatctctatacattgagattaagaaaatcaacaaatacttctgagggaacaaaacctttcttagagaaggcattgcatgtattgattattcattgtactaagaattaatctaatcacatgtgttatcgtaaaaacaatagccgagagggttcttaactgttgaattttctgtgattcctccaagtccttttgtccctaagtgcatttaaaagtgttggtatattccttttggaaaagtcgtaaaattcggaaacacaaaaaaagaatacaagtgagaccctctccctctagcttgtgcggaggatgatggaagagataccttaatgatgatgcacgagaggtaacagccattttcttgatttatagatttgatatgaagatagtgatatgaatagataaacatatataattttcaatttgggaatgcgactgacatttggagcagttgataccagtcgccattttgacaagtccaatgccacctaacaattttccatattctttttttctccttcccgtaaaccttattagccctttcttttggggtacattaaactattcctaatttatttgattcaaacgctgtattaaggaggcactcgagatttttggaaattttagtgttagataataaattgtaattgacagaaatataaaaggaaagttaagtggtggaaactgaaagagcaaagcaaaaaggttggaggtaggactgcgtcaaagccacattacaagtctacgtagtgggtgtggtggggtcatgtggtccaaccatttgggtatggtcatggtagttttaatgtgtagcactaaaaaatgttttcttttttccttttatgtaagtaaaacgttatttctaacaaaaaaaaagagtctttttagagaaaattaattttctaatacagttattatatgtttacattagtagatgatgtaacgtctaaagttcatttatttaatttcttaactattttattttatgttatatttttattttactcttttgtcttttaaaccaaataaaataaaatgaaatttcagtagacacaaaagaagttaacaaaaggaacgaaatataaatatacaccatattacatgtttagtctattttatattgtcatattcatactaactatatttgacattccatatgtcataatacttcaaacattttttatttaagtataaagtttttcagctagtattcaaatatagtctttggtactatttccgtcactgagtacgatgatggggttggtaaccgagtttggatacatcggagcaaactgagagaacggattggttgggtcaaactcttcactaaacaccaaaattggaaaatgggcgccgaagtaaatatgagcacgcagtacatgatgcatagttactacataatagtttctgacttcatccacataccagatatccagtacatcaagaaatactatgatcgaagccatctaaaataaaaataaatctagtgagaaataaatttctcagtaggcaaatctaaaccactaaataggttagtaggttatgaaataagacaaaactaattcatcaaataatttaatagagtagtaaataaattaatatatctgagcgaatgtgtaaaatgaatgtatgaatgcatagaatgaaatgcaatggtcacaggtgcacatggcctctacatatgtatattatgtaggaatgctgcggtcttcttacgctaatcatgcatgaatttccatgtattagcacctgatctttggtagtaacataggtctggtcttcaaaactcgagtcaatctcataaattcataggtccgttctggaaacccgaatcattctcattcataccacaaaattcataagataaggaaaatattcctattcttacaaaaagcaaggtagttaataattaagtattcttcgttcctaagcaaggtagttaatagttcataccttgttcacgtaaaatttcaccaactaaaataaatctatttaacctctacgggatgtcgatttttagtggtataataattgtagccaaaaatcgggttcgtgaaacaatgagaataatatatatatatatatatatatatatatatatatatatatatattaaaacacagctagttatagcaaaatatagtactcagaataattgtacttgtattacttaaagcctattaggtttacttgcggtttaaccaggtttattatatatatatatatatatttatatatgtctatatatatgtatttatagtatatatatatatatatatatataaaagacattaaataattacttaagtactataactatatatatataagataactatttatgtattatagttatatatatatatatataagacattaaataaattcttaagtactatagctgcttacttggaagggccgaggtaaatatggatatataaggaggaagcattatgtggaagtaaagcttacaggctgctggaatccatatatatatatatatatataagcatggtatggcataggtacaaaggtgcttctaaatgtaaggctggctaaactacatgcacgtggtcagagctgctggattctatttattccttatgagtcaagatctatgtgtataaataccctaaagaataattactacagtatctacggaccgagatgcatgaatagagatatctaaactattatcataagtgtgccgagatacccttcgtaagtttccttcacacacacacacacatatatatatatatatatatatatatatatatatattctaggttgccgcatcttgctaaaaattcacaatatcctatttatggtaaaacttcaatctttaactaattaacggttaaccatggcctcataaatacataacttaatcgtaaattttagtttcaaattttgagatcgaaacccagcctacctatgataattttggtgagttgctttgagagctgctggagtaattttacgtgagagagagaagtgtgaggtgagaaaattgagagattttggggcagaaattttgtaagctgccaagctatttttatattgctggttatgataaaatatctaagcttccttatttcattcatcattactattattcctctcattaatgcgtgcatttacgtggaacagctgagagcttagctgagggggttttgccacctggaagatttcctaaggatttggattcaacttgtaattcctcacatggctgagagctaatgctagagtttacattaatatttgttgaaaattatttttattttttttaataatattacctattctatttttataattttatattataattatataattgaagttattacaattattaaatagaagttaaaagtataataattagttatgcatttatttatttattttatatatatatatatttatttatttttctaggatgttacagatgatgtacgctaataatatgcacaactattttcattatatcaatggataaatatataatatttattaatgtacaagtttaacgataattttttttttgttagaatcaatacaataattatgtcatatattaaggaggaaaaatttagttgcaaggtttactctcatgagtgtaattttgtttaaagaaaaataaatgcttagtaaatattaactatatatatataataataagtattatataaaatatatatttttgtatatattataattctaacaagattatcaaagtaaaaatttaaatacagacacatatgtcaacacccaattttgtccgcttttcttaatattttattttctaacatgaaataaataaattactcttaattgctaaaattggatcattccatagctgagcccaatacaagatatgcaacaaaataaataatgaaagaataataataaaacgaaagcatattgggccaacaaaacagcactctcaatgtccaatgcgtattgctattggccctaacactttagtcatcccacaattgtcgcttgaaaaattgtacaataaaatcttatttttgttgtgttatttgattttactccaaaataatataacgaaattaagattctgttgtattattttactttcactctttattgtacgacaaaaaattgactctattatgttacttatccaataatacaataaaattatatttttgttgtaggttttttttttgttttaaaaaacatcataacaaaaatacaatttcattatattattcatccaataacacaataaaatcttagtttcgtcatgatgtttttctaaacaaaacaaaacacagcagaattacacttttattgtggtgttttctaaaaaaaaagtgtataaaaaacaaaaaaaaaaaagtgtaactagagtgttactaaggaccaatacatactagaattctagaaggatgatgaaaaaaatttaattttgttttattaaacacccaaaaaaaagatttaatcctatttaataaaatgtatgttgagttatgactattgactaatgactaatttagatgacaagccatttcttttgcatataggaattggatccaatccattcaaagcagcccctggaggaagaataagcttggaaagcaaggcagtatttggatgttttatagcagaaataggtgcacgtcatgggtttcagtttttgccaccaaaaaccctttccaccattattagtgcataataatagttagtctcagtcatacccattcctaggtttatgctgttttcttcccagcatcgctccactgctgcggccctcgctgttcttcaaaggtcactctctaaaatccccacttttatatgtaattggggattttgttttcccacttagtttaattaattttgacgaattgcatcataggcatttgttatgtttataggtgtgttccctctaggataactcaatctgttagatatacaaaatcaacaaaacacggtaaaacaaaacacgatcttcatcctgtattccacccagaatccacctccacttcccaggtttctcgctcatggggtgcctatgttgttgtatgttcccttactccactttttgtctcttattgttgcattgctattcaacatccgcgtgattgtttacctcatttcaagtaaattgaattctgtgttttattccatttaactgcagccagctgctgttctaggatttgccgggcttgcagctttttttcactataatgatgagaggagagcggttcccaaaggtatttgcaatctggtattctcaattgatatctgctttgaagagtttggagttcaattatttggtgacaagtgtttctttttatctgtacccttctttaattattatgccctttcatcatgagaaatatttgcaatcttttattcctttcttatattttgttgctacgcatgttatcttgagtccagtttacaccgaaaggaaattcttacaggtttcggattgttagtgtcaaatatggttatgataaaggaggtcagagggtctaagtatatcagtgatctggcgtactggttataaagtttcagtggtgtttcatgaactatggagtaaggtctaagtatatgttagaattaatttttgaaatatgacctgatggttttggctttatggcactctgttaaatccgttgatgcaatttatgaacatgcaagcattttgcaaatgggaaactttccatggtcaaaattttgacatgacatacactgagtaacatcagtgtctaaaaatgacgagctatgcaccttttgctcattttttgcttagttatttacttatatcattaagttttttatcgcagcattgtgccaaatctacatctaccaagtcgcttttagtgccatttaatgattaggcatgtgaatgtgtatatgtatttggggacaggcttcgcttaattgccagataaacacatttgattagatgctcagttcctcttagtttaatccaacttggtttctttctgttgatgaatccaatttgaaaaagagtcaaaagaaatggttcgatcctcttatttttatttctcaaagggagagatccatgaatcgggatcctaatgcatatagatacaaatggtccaatgggagtaagaatttccaggaacattggaactatttcatttctgagcagaatagccgttttcaagtagtgtttgatcgattacatatttatcaatattcaattgattggtctgaagttattgacaaaaaacatttgtctaagtcactttgtttctttttgtctaagttacttcttttttttgcccaagtttcttctctttttgtctaactcacttcctgaatattctaatttatgtctcaataataaaatgtttctatttgttcttcatatgtatcagtgagctacatatgctttgatgagaatatatggtaaattatcaagaacaattcattacatcagaatgtagggtggatatataatctgttacatttttgcaagattattccaatacataaaggaagtggtaatggcatcataatttgctacttcttaattcttaatgaagatccattttttgttgtgttaaaactgtataatctcttctttgcaaaggtttctgttttgcaaagtaggcaattgttgggacttgttactggagcttgggatagatcctagtcccattgctttatgacttaattggttggatttttattgtctaacctgacctgtgacttgcaaatgtaaagcatgcagttgagttgaccaggtcaatactttgtaagaattacacacactcgactaaatgtttaccttgctcttatccaagattattcatagaatcacttgtgacttctgggtgagatggtttcattttcattttgaagttgtcaatttccaggtttagtcatcaaagtttagcaagttatcggattacattagtgtcatcccaatataagttttaaagtatgttttatttccattgtcctaatttctttatttcttggatcaggtcatcagggtggtggcctcagaaatgttgccaatggacccataattgggggtccatttacactaattaatacagagaaacaagcaattacagaacataattttcttgggaattgggtcttgctctactttggctatacctcatcccccgatcttgggccagagcaagtccaaattatggcccaggcaattgatatattaggtttggcacttcaatctcagtttactgtgttataagtttctttctctgggttaaccttaatattatgtattttatttggataaagaatcaaaacagaatcttaagattcttccagtatttgtttccattgatcctcaacgtgatacgccctcacaacttcgtgcctaccttaaaggttatattgtcttgctggcaaaacttcacttttaattacttcaaattttagctttggtcaattatgctttatgcttgatattcaggtgtgcttatgatagctgagatagggggtgccaacatagttgggatgtcctacctcattgccattccttagttcacctttccaaaatgttctacccttttggctttgctctactaacgtttcttgtctatctttccctctgttgtgttgcagagtttgactcaagaatcataggattaactggacctgttgcagctattaggcagatggctcaagaatatcgtgtttactttaaaaaggtagaagaggatggcagtgattatcttgttgactgttcccacaacatgtaagcacttgttctacccttattcatccttctgtagctctgtatggttgcatttaaacatggatataaactatgttaaaacaattaggtatttgctgaatcctaaaatggaggttacaagatgctttggtgtcgagtataatgcagaggagttgtcagaagcgatagggaaagagctgaacagaaacccctcttgatactttcgatgcagcctgatattattttttacccacgcttctgtttttctttttcttttaattggatcacagaatcatttacatttgacaaattaagttttacttttagaggattggatttagctctgctttattttcaactagacttgcagaaaattgtagtgacaatctgagcttcattttaagtttcgcgggcatttagtttttggcttacatcttagatggatgttttatacttgaatgttttcacatccaccttcgtctaacaagcactttggttttagttcatgacttcatactgtcacgtgtaagtttgctagtcctattcctggacttcgtttcttatatgccacctattagaagtttaaactagttaattatgaaaactacaatcgcatgagatctatagatgtaaatttgaccattaaatcctatgtaaaagtagaaaataaagttgtgatattgtaaatggttatgcaacattttaatcttaaaatatttatataaaattgtattgttaagatagtttcattaacccgtaatacaatgtataataagaatataaaattgtatatttatattcttattctattaggtttagtcaatggcatggattataggatgtgatgtaattggactcagttaagaactgatttttttagagatattttataatgaaaattcttctaataatttgctctaatgttcttaatctctttttaagggtttctgttaccttttcagctttagttttgtgattacaagtcgaattttatttgtcttcttgaatccatcgtctcaatcgttgtttatcaatgaaaaacttaaaaaatattagttctcatttttcttattttcccccttttcatctttaatatatcttacttgttgacattaacatgcatgttctttcctctagtttttcttgtataccaaagtttaaatactattaagtgcctatctcagcttcttctccaacttatttgacacatgatgttaatatttttctgaataaatatgtccaccatctccaaagatttatcaaaataccaattaaaaaatggaaacactacggtttgtttaagggtcgatgtagcgactcaaaccatgcagcaagttaattacatataacaacataatattaatactcataatctatcgtgagggttcgtgcccatgaccgggtgggtctctgggttcctgccataatcaaacaagcatctgaaacaaaacaataaaaaaactaactcatttgtgtatcagtactctgtgtcccttctagatgatgcaatttcatatgacctttccaactgcaagaaattttgtttccaaggagtccctccaggatctaggatcgaagttggtgctgtgtttcaatgttcgatttcacatggtttggttggagatgtttgaagtcatcattttatagaatcaatctttatttgtacaattcttcgttttccttgaattctgatttctgggcatgtaatatactaagagattcaaccagccaaccaatctattaaaatctaatctcccttagaaatatagtagtcctttatcatcatcttagtgaagcatcctttaacataagcaaaaagacaaacaatccaaaccattggaacatgggaaacaactccccacagggaaaatgtggttgtggtggtttcataaatggagtattctgacgttctcctcccaacaacaacaacaacaatgccaacaactttgaaaagtcatcaaacgcccctgacaaaaaaaaagatcaaggtggctgtgaagatataactttctccgtaacagcttcatctaataactcttcaactcgttctggctccaagcctctccacaagccaaaccctgttgttaaccgaacccaccaaaggaaccatcccaaagtgtcacctacggagggctatgtcaacaatggaagaagggtccctaaagaagcaattggtatttctggtgaacttgaaagcatgatcaccgatcgtcaaaagggaagcagcacccttgttcgtgcttcttctagcaacgtgatgatgtttggtaatttaggtaacctcaggcaaggagggaacacagatacctattctaacacaaacacctattctcagaaccctgttactagtggaagatactcaaaccaaacggtggagaatgtaagtaaaggaagcaaggaacaaccgggttctctatttcagggccgtgtccactagaatgaacccccaatgaggattataagaatggaagatttcaagaagcattggctctttacatgctgctgcaattgcaattgaccctaataaagcttcctacaggagcaacaaaattgcagcattaacggctctagggaggcttctggaggctgtgtttgaatgcagagaagcttttcaaatagagcctcgttatcaaagagctcattaccgattgggaaacttgaacatgagtaatctcacacaagaaaaagatggtgattgcagaatatactccttccaactcttctattttttttctttctttcttaatggtgttgtcactaattggtagtttctgtttccctacagattaggagaaatggataaggctctttatcattataaacaagcaggaccagaggctgacacagaccagattgctaaagtcaaaaaaattcaggtccatttgaacaaatgcacgtaggctaggagattggaacaagttgattaaggagaccaactatactatttcatttggtgcagattctgctccacaggttagctactagcctctattacacgagaaattattacatgatctagagtcattttggtctcgatcaatctccacaagtaacacagctttactaactttttcattcatggaaaacctgagttatatgtaatgtaaatattgattgagaccatagacatatggtagtcttgaatcatgtaataatttctcctattacacattgaactctgaattagatcttacccgcgatcgatcacatgcacatgcatttcaatcatgctgatatgactctgattgtggctttacttgaagatatttgcgttgcaagccgaggcattttttatgctccgtaggcaccaacatgcagaagaagcaatgttgaagggatctaattttgatgtggatcattgcaccaaattctttggacctatttgcaatgcaaatacattggtgacttaggctcgggttcttttggctgctggcaggttaatgtttcgtttctaattgaaaagcagaatatgtttcttaatctctgtctattcacacaataatataccagatttgaagatgccttagttgcaattcagcgagcatctaggcttgatccaaataataatgagattaaggaggtgattaggtaggctagagctgtggccactgctcgatcaaacggaaacgagcttttcaaggcattgaaattctccgaagcatgtgttgtctatggacatggttagagaatgatccatataactcggttttgtgatgcaactgagctgcatgtagatccaaaacaggccaacttgagaaggccctggaagattgcaatgctgctcttagcttgcgtccatcttacagcaaggctaggctgagaagagcagattgtaatgccaaggtaaaaacagaaaaacacttaaagaaagttccttcatttacttacataatgcaatgcacttttaacatttttatgtgcttaatttgtgtattatgtttatgatatgaatgtagttgaaaagatgggaaacttcaatgaaatattgcttgaagagacaccggaggatgaggaattaagaaggacttcgttggaggccaagagcattttatccaacagcgaggtgaatgaaggtcaacactcataaagtaatggacttatcacttatataaagatagtttagagacagtttggcgaagatatgaaaaatgaagcgtgacaaacaaaggtgagaacaggaaaaagggccctaatgtgcctgtttgtcaaggatgacagaaaagcacacttgtcaatgatcaatactcaaatcctttgtagaaaaaggataaaacacgttgttgaggaggaaaactgcgggcccgttgacaagggaaaggtgcagcataaagtatcaatgaattatttctaaagttgaacttgaatccatcaagtgaaggtacaaatttacttattttatattgagattgaagtataaattaaatggtcggagatagtttgataacatctcatattatgccataaataaaatgattttaaacaaacataaatatttaagagaagatatattaataaatatatttcatctctaaaaataaagaatagagcttgtaggcatttgttttcatctttctctctcttttcccttttagaaagaaacttttcctgggctcatgattctaaaaaaatcaatatttgaaaaacactggttccagagtcaacggttcaataagatttgaaccattttaatgaaatatattttttaatattttaatataatatcatagtaatattgaaaaaaataacataatatacataaattgataataataaaaatagaaagtaaacttcactttaaagtatcataagttataataatttttttaaaatcaaaacaatgtcgttttgaaagttttattttttaaaaaaaattaaacaaaactagttaacccaatgactttatcattttttagtgatttttgattgattcaatggtttttagccgatgtaaggatgtatcaattttttatcaaacaattgaccgattcatcgaatcaacatgtcagattcgattctcaaaacagtggaaaaaaactccaaaatttacgttggtttgttaattcgcatgttggaatgacattgaaataaagatatttacacaaacttacgctaaagcatttctttttatatattcacatgtaaattattagaaaatatttttatttgtaacttttgaataataatccagcttgtgcttacacatacaagtttctttttcagtgtccggggaaagccacttcccttgtttcttgtattcttcaatgtagcgctagcaaactggggggcacttaagtaaatgaataaattatacgggcaactatatttactctcgtgacacgttctcattagagtgtgtttactgtttagttttccactaatgagaaatcccgtatgtaaacagaaaaagtactaatatctaacgttttatgaatttcaaaaaaaaaaaaaaaatcaaacacatgattatatgaatatgaagttatatccattgtttctcttgtgaacgtttatgtgtaattttgctcgctaattatttccaacggcactatatgtaatcttgatgacaagaattactgtttatcattgaacaaccaatataatgttaagtttaacgtgactaatttaagcacaaatcatagtttaaattatttttaaaataattattttattaatgatactgataaaaggactattttaatcaatttttaaaatataaaaaattaaaataaatttttcaaaagataaaaactaaattaaaaaaattaaaataaaagataaaataaattatttaacctgtttggaaaagatgcgtactctcatccagatcaccgattattattcaagactagaaagacaaaacgggttgctaacccacaaacccgatgccaattcaagtactatggtgatctggatctgtttctcaatattgataaatacactcaagcacgtgcattcaaaatagagaacgaggatccggatccgggtcgctccgaaacggggcgggcctgatccaagctgtagcggcagtggttcctaacggcccaaagctggtaaggtgaagtgtcgagagcgagccactgctccacctcgtactgctcctgagcgcatgagaggtggggcccagtggaggtgacctcgacgtagttaaggtaccagccgtgatgcgaacccgacccgtctgaagtaacattaacggcacagacgggtccgttaagacagggtccccttccgctgaagatatcgaggttgccgcgctcgaagtagctgtggcccttgcccatcaagccgccccatgcttcgaggtttttaatgtagatgtagtagccgtacttgtcgtacagcttcagcccgatcttcgagtccgttccccccttcaacaccgaaccggttctaacgtaggccgtgtagacacaatcctggtcgctgtcgctctgcattatattggatttcaaagcttagtagtaagcacaaattatgaaattaacgagatcctgaaaagtatgaataatgatgtttttgttatgagttagtagaaggagaggatcggagggagaacagcgagttcttaccgatctaacggttgcggcgatgcagagtgagaacagaaggaggagagagagactctgtgttgcagatgccatttttgagtccaagtggtgatgagggcagtgccataggtattgataaatagagcgagccagcgagggacacatgattcatcattctcctcaagcaaattattaaattaattagtatcagatttgcattctaaatatacaaatttctataccggacttaccaaaacaagtcgttaacgcaagacacctaacaaaattacacatactaatcaaaacaatcaaatatgtttttcttctttaatttatttatttatttattattttgctccataatttttttaacaaccggtcaacttttttatttttttttcatctaatattctagtcctacttttaacatcaactaactttgaatattgatttagaaaacaaaattaatacatcaagatttatgctaggtttcgttttatgaaaaagaaaaagaaaacagaaataggaaaaatatttaaattaaaatagaaagaaaaaaaatgagatctattttatttttaaaattaattttccttgaataataacttcttctccacaaccaaatcatcccttaaagaattctacaattagttttgagacaacaaatatcttttctttttattattaaagtgttattagtataaattgaaaacgactttagaataaggttgagtcacaaaggaacaaaaacttattctttaaaaaaattaaaatatatatcataaaaatgtaagttctgtgatcaatcaactaagtttaaacatgtcttataaaaccaaagtgtaatttttcatatttataatttaactaaattaaatcttttaacatttttatatattactttaatgctcaaatcagtgtttatttatggattatgaaattaaattaatatttgaagtcttccgagacacgcgtatctttatatatgcatgtctaatttgtatattctatatttttgttactagatttctatatttctttggtgttaattaagtgttttcaatcaaaagttaaaatgtaattattaatatattgagattcatttaaaggattaatttttttatggatgctttttttatacacatcaatcaaggattgaatccataattatatgtttaaaaaaataatgttatttaccaatatgaaccgaagaagaggagggcgggaagggcccagccccctcttgacatttctcatgtatatagatttaacttagttaatgtaaatttgtgtaaaattaattatctatgttattattataatacttttaataatgattaatgtagttaacataaaattaatagtgtttgttattattatcatactgatttagatgataaataaaatataattatgtatttattgtttttatgatgattaaggttattattatttaaaataaaaattagctttaattttatatataaaaatagtaatttaaaaaatattatttatcaaaagttataaatttaaacaattaagtaagaaaaaaatgtaatccctctttaataggtttctggatgtataccaagtaccaaccatacaacatgtttcatcttagaataataaaataacacatttcacacgcgctcacacaaaaaaatttcttggaatataaaatgacacatttgcacgatttcacgttatcgaaatctctgaatgagtccctagctacttttagtatattattagaaatatctatgatggttgcttaaattgaaggaatctattaaaagaatttgaaattataacttgaaaattttaaatttttgaatacacgtatttaaactatttgtactttctaatatctggtacgtgagataacatgcaatattgagaaatatctttaagaaaaatcaagactcaaatcacaaaagcataatgtcaattcagaaaaagaaaacaacttgaaaaatgcagaaatctaaatagtttcagagaggaaagagaaattaaaagtaagtcgtttaaaattaaaagcaatttaaataaaaaattgtaaaaatgtgcaatgaaaatggaagaaaattgaatttaaaaggaaatttgagaaagaagagtatgaagaacaatgcaagttaaaatgtgctgatgaaaaaaagtgctactttaaagaaagtgctgaaaaataaataaaactaacaatttatataattgaatttatcaccttttataaaataaaataaaattagatgacagtatttggtgtctgactccaatatatgaacttgtgtgggttaatttttctttcgctaaatgaaaactttattaataggcttagaagcctataggaaaattaatacaagacatatatcaacatgcaaggcgttagaaatgaaattaggagccacataaaaaatattgtatcacaccaaagacacaaatcatacttaagctaaaacatcaactacttgatttgtcttatgcaacacatgaacatgagttctatactgatgatgttgtggattgttctcactaagttaattataataaggatgtaattgacaacgacttcattactatctaagaatcaaagtagacaatgatatatcaaaaacctctattacaagctaatttcaagtcatgaaaacctctatccaagttttgtagcatattagggttcttaattgactaaatgtcattttaatcttttatgttttatttttttttttgttttgattttttaattaagttttaaaagttttatttcaatttgattcttttagagttgaacttccatatgataagtactatgcacggttaaattccttcaggaaaattacacccactctatttttgagatctttttgaatggcaaataaagtcgtaattaacataaataaataaaataaccatcatttagtaatgattaatattaattaacatttctatattagattgtttttgggagaaaagagagaacaaagctaataaaaataaagtggtaaaaaaatatataaggtgaacatgaaaatcaaataggtaattttctttaaattttgctaaagtgcatgaacatgaaaattaataattggcagttggacgggtggttgacatatatatacaacatcatttttggttgtagttattacttgttacaagtatgctaattacactcaaagcacaaaaacagacataattcttatacgcactaaaaatagacgagttcagaaaactaatcatgtcataacggttcttaataatcaaaagttaacaaccttgaattagagccaatatagacaaacacacccgtcataacaaagctgtatgaagtcccaagaaataacaaaatatccccatgcatgcgctgtgcgtttgtgttttccacgctgtcacaacccctaagcccccaaactaattctcttcgaatgcaagcaatcgttaattcgtccaagaagaagccgcgtagtcattcttcttcccactgcgcgcgcgcgtgccggcgtgcgattgcgtgtttgccaatggaggggcacgccgacgtctccgccgcattgccgcctcctcctggccgccacggcgccgacacgtacatcgtgcagttcccgaaggaccaagtgtaccgcgtgccgccgcgcgagaacgcgttgatcgcggaacagtaccgcaacccggcaacaacgaaaaaaagacgcggcggttgttgttgctgttgcagccgtcgtgtcttcctaaccgccgctcttatcgttgtggcaatcgttgccgtcgttggcatcacgctggccactttgtactttattttcaacccctcgggtcccaagtttactgtctcccatgtggcggtgaataggaacaagaactctcgggcggcgccgcagtacgaggtttcgttgagggcgaagaatccgaacgagaagttggcgattgagtaccaggatggggacgtgtcgctgttgttcgataagattaaggttgccgaggggaagtttccgacgttggagcaagggcgaggtgaggcgagtgaggttacggttgaactgaccggatccagtggagcgttgcccgggcgaatgcatggtggggacgcagccgtggatttgaaattggagatgaaacttgcgatgaggataagaaccgcgggactcgaaacgtgggccatgaggtccaatgtggcgtgtgagtttacggtcagcggtctcgggaacgacactcgagtcttgtcacagcaatgcgataccaaattcaagcaatattaatttcattaattggagaatattggttaattaacgattaggagcattggatatatgggattgggatatgtatcttattgctgtagcggtgattggatgatgaaaaaaaaaaaaacatggctaacacttcaattaaaccatgaagtcttccttctctgtcttatttttttctcagcttaatttgttgggtacggtcttcttattggatatattttatttttgttttggtttttgcgtgattaaacatagaaatggaaactaaacagtgttctaacgaatgagaaaaaaagggaaagtgatgctgaatgaagaatggaagatatcaagatttcatgttcaccgattcaagattgcttcactgaaatttggaaaaattattaaatagttttagattgttatgatgcctattaatatttacatgataaatattaagtactagcactattttttttaaaaaaaaatctgaaattacctaatactttttcctgaaattacctaatactttctgcatgtgtgtatagccactacaatttgtttaatagatccaaattatcaaacgattaatataaacgttcagaatctaatcatctattgagattgcgcgccactaacaaatgaacaccagacagagattgcacgcccacagtaccacccaaacctggttccacccatcggacacaaaaattagccaccgacacccaatcgggttgctgtgttaaaccacatttttattgaatagttatgcctatcaatatacgtgcaaaccactattctaattctgcaacctaaatcaaattttaaatgattttttgttcctctcttcaagtatttccaggtttcatgtgtgattttttttaatagattgttttcaagaatgacgtgtaaagtttgtgcccataatttaattttactccgagcatgatatttctgacttacagagactattatttcatccaagtcaaccggacactcccccacacgttgtactccgctcctctccaaagtcaaagacggggcaaaatcctctgttcttggatctgaatcttaaacaccgaacatgtcagaacagtaattaatctaaaaatgaagatgaagatgaaaccggagaaattgacgttagtgctggtgaatctggcaggtattatggagaatgcaggcaagtctctgcttccaggagtgtacgaagaggttggtgctgctctgaacgcactcactttcttcagaacaattgttcaatctctatgttaccctctcgccgcatacctcgccacgcgtcacaatcgtgcgcatgtcatagctctcggtgcttttctttgggccgctgccacattctttgttgccatctcctcgcctctctttcaacattttgtcctctcctgacccagtgttgccagggtatttatttctttaatgaatcaagccaacaaacataatatattgaatgattatataccaaaattataaaagaaacatacctttttagatttttggaaacacttctttcctttccttgtatataatattttttatcgacgaagctgaatagttttcatcatcgcatgtaagaattttcaaatcagatgcgatcttcactcttgaaactgttacatataattatacatatccatgtgagaatacaggctttgaaaggaaaatcccaactttttatccttaattttttaatgaatacatattgtaaatatattctattaaatagtactagtcttcctgtgtttccgtaaaaacttaataaaatacaaaatatgcgaacaaaattaattttgatttaatgaattaggtaatatttgtggaaaaaaaaataaaaaatcctaacaacattctctacacattcttttcaatacactctttattattgaaataaatcataaatttttatgaattttatatcttatttaatgattctctttttattaatgattgaaatttattaaaaatcataattttttatgagttttatatctcatttaatgattctcttttttattatgtaaatttcaattacttctaaaaaaatagtaatccctagaaatatagaattataacaagattaattacacaagacacacactcatatatatatatatatatatatatatatatatatatatatatatattttgcaacttctacttatcgcataacatggataattaggcaatatggagaggtttaaatgggattggactaacccttgttactccagcaattcagtccctggttgcagattccaccgttgatagcaatcgtggtatggcttttgggtggctgcaactaacaggaaactttggaagcatcgttggtgggctcttttctgtgcttatggcgccaacttcatttgcgggtatacctgggtggagaatagcttttcatcttgttgcaatggttcgtgttgtagtgggtatattggtgcgcctctttgctaatgatccatgcttttcaaagagcgatggcagagcaacaacatatcaagctccaaacaagtccttttgttctgaaatgaaagatctaatgaatgaagcaaagtcagtaattggaattccatcatttcagatcattgtggctcagggagtgtttggaacatttccagggtcaagcttgtcatttgccactctttggttagaactaataggcttctcccacgtcacaactgcattgctttggacactatacgtggttgctacttcatttgggggtctatttggaggaaggatgggggatattttatcccaacggtttccaaactctggtagaattttgttgtcagttgtcacaaataaactccagttcagccattcccctagctgcaattttgttgttgggattgcgttatgatccatccaaggccttcatgcacggtctgcttttatttttcatggggttaatcagatcctggaatgctccagccactaacaagtatgtatatccaacactgtacttgtttattttcttcagaaaacaacataaaacacatcgtatttgctttagataatctacttttttataaaataaataatcttcattaagatgagggtgttacgaataatctttcaaagttaaatgatggattatctatgttgaattgagtgcttaccatatataaataaaaaaatcaaagttgtcttatacagcaagagtgctacttatttcatcatagcttgttaagcaaattaacgaatcccaagggagagatgctgactaaatgaaaccaattaagagattagatttattgtatttaaagataggttgcttaatattatgttttgcctctacctttgtgcataatgttgtggccctgttgttgaagtgagcataaagatatttagttaggagtatggtggcatgttcaaatcgtaattcagtcaaccattgtataaatcccggtgtataggtgtttacaagcaccaaggcaccacataaatgcaacataaaaaatgaaatgtacaaccattatgaatttccattatttaagaaattagaaacacattatgaattttcagttctcattttttgttaattggattgggggtggtgtatctccatgccctgtgttagttaccattatgatctaggtatgctagcagcgatcagaacagtagcagtacttaatcaatcatctatctataatggcccagaaacttgtgatgactgcaaaatgacagttaaaaggggaggtagttgtagagggtttacattagagaaatgttatttgtacatgtcaactaagagaaatatgtggagtaataaatgataggatggaaagaaatagacgcagaaagtgttgtataaaatgttatatgaataatacaattacattatgtgcacttaattagttgtttagtttgccttgaaattgaaccgtgtgaatattccaatatttgcagaaatagtccctgagaagtcccgaacaactatatatgctttggatcgatcttttgagaccatattgtcgtcctttgcaccacctattgttggagctttggctcagcatgtttatggttacaaaccaattccaaaaggatcctcggttactgttgagatagaaacagatagagaaaatgctgcatcactcgccaatgcactttacactgcaataagtattccttcggtactctgcgtttccatcgactcgtttctatattgcacgtacccgaggaacagggagcgagcgagaatggatgcattagtggaatcagaaacgcaacagctagaggtggaagacgtcacaaaagaagaatacagagaaattcatgttttagaatcaaatggaatggtaaagaaagtggcacgtttgacattgattatccaaggtaagaggatgataatgatgagaaagttttgttgtcccggtagttcacttagcgggaacacggaggttcatacacatatagaaacattttcatttgataattcaagatcacttgaagtgaaatataggaagcatcgatattttcatttgctccacgtatttgtatttcacacatatcttactccatatagaagtatcatgaatgatctcaaaaaggaacgaagttgatgtacttctatttgtagagaatagaaagtgatttataatttttattttgttcttaataatgtttaagaagtatgctcttgattttcactcttggttgcatcctaacctcaatgagaggagatcaagcacggggctgacctaaagtgtgtatcacgattgaagttatgtttaagtagccatttctagatgtttaagaagcattatcattgaaagtcactcccaacaagttacttagttaccgttaatttgattaaaactctcacattatccttggcacagcttgattcaagtcattcaccatatagctgaatctatctcgtggacacatattgttcatgtagccaattcgatccatgatgctttagccaaatacggtatttttctatgtttcggcctttaggaccttatctaaaaaaaaaacaagaaaaaaaaattatttatactgccacaatataccataccaattacgtcataaaaaacaaacaaaaagaaaagtatgccgccctacttgttcctttttaattaaataaataaaaggaccataaacttgttaattctttataatcgtccaacttcttttctaaggtcgtttctcttgataacctaaaaaaaaaactatataatatagataccggcacatggaccagcaggatctttgccagaaaaagacaaatgcgagcaaatataataacatatattttgtgaatttagaacttcatgtatcctacaatttttttaaaaaattaatatttaaaaaatataaaaaaattatattattatcaatcagaaatcatatttaaattatttttaaataattatttcaaaaatcaataaatttataatacataataaattataattgaataattatataaaaaaaattacattttcaatgcgtaattaatgttaacccatcaatcaaattatggtcattactatattttgaaaatagcaacagctaaactaaccaacctcgagtataaaccaagctcagcatataaaagtaataaaccagtgaggtttgttcaacattttgtggaattacgtgcaaggcaagctcatcatctcccacagttccgatcctgtgtgttgcccccaccgtagcatccatgtgtccgtccaagggcacagcgaattcctgtgttattgggttgtgaaaagtggagaaatagagtgtgagaagagttattgttggttgaatatgtgtgtgaaaatgaaatcggagacagtgaacctggtgctggtgaatctggcgagtattatgcagagagcggatgagtcgttgcttccaggagtgtacaaagaggttggtgaggatctgaaggctgaccccactgcgttgggttcgttgactctcttcagatcacttgttcagtctctctgttaccctctcgcggcttacctcgccacgcgtcacaatcgtgcacatgtcatagctctcggtgcttttctctgggctgctgctacattcctcgtcgccatctcctccaccttctttcaggttcttacccctgcttttcttatttggattcaacatgttttcacttcttagtgggcaagacaattcaatttctttttttactatgattcatgaaggattaattcaaggtcacatttctttcttctttttaagagaaagttaaagatcacatttttataggccttttttttttataaaaaaacaatattatataacatatatatttctcgtttattcttataaaaactacataaaaatgatataacattgttatttcaattttagataattaagcgtgaggattagataactatactgctaatcaatttatgttaatacttttctttttgaagaagctaaaactgaaattcattaaaaatcaaactaaacataaggcatgtttagcttgatagaagagcaatacaaattgtaagctcacatgtagcagtttaaaaccaaaccagccgcacgccaaaacactactaaccttaaacgaagccttacctagtgctcacactaaagggtacaaagaaaaacaaacagcagttagactcaatatatgttaatatatacttgatagttattactaagtaaagaatgagtttaggttttgttaggaattattaaaattaaaaatgattttatcgattggatttagaaattcactcaattattaaatttggataatctcatgttatttattttaacacgataaagtaatgttacgagagataaagacgtaagactaattataatagtgcatttagagttcattaattttaatttgtgtctatgtcttattttcacattataataatatggtgattagtttactcataaatattgtgcgtcataaaggtgtttttaaattcatgtaaacattaactgtataaataaattaattaaaaatgtttaaggcaagcatgtataatttattcataaaaatatgaaaaatatgtattaaaaaatcaaattgtaaaaaaatatgtataattaacttaagagaatttaaatttaaaagaaaaaataaaaacgaaaaggaagaatacactaattcaagctatccttaaaagaatatactctaataagtggctgagagcttgaaaagaaaattgggtggattaaaattataatctataattaaacataatagtttttataatataatcatccataaattatgaaaaaaggaatttttatataaaaattaaatatagttgacttgataatataaaaaaaaaatattcttaaatttttttgcatgtattgggaaaaaatggaatataataagcatgtcactctcttaaaagttacattgagattcatccaagtaaagttggataggctcatttaaaagggtgaagttctgcagtccctaacctgatacttaacataaaattctgtgattaactttcaggattgaccataatttgcatgatcatatgactaattcaaaatatacaacaagataaaaataacaaacatcatgatcgtttgcttaacaaaattatagttttgtatatgcattgttactcatacttgtgttttcttagcccatgttttccctgaatcatggtacatgtttccttactccttcgtgttgcacaatatggattatcaggtggcaatttcaagaggtttaaatgggataggacttgccattgttattccagcaattcagtcccttgttgctgattcaaccgttgatagcaaccgtggtatggcttttgggtggctgcaactaaccggaaacttaggaagcatcattggtggtctcttatctgtacttatagcctcaaccacagttgcaggtatacctggttggagaatagcctttcatctagttgcattgatcagcgttatagtgggtatattggtgcgcctctttgctgacgatccacactattcaaagcgcgatgagacagcaacaactcaagctcgaaacaagtccttttattctgaaatgaaagatctaatgaaagaagcaaaatcagttattagaattccaacttttcagataattgtggctcagggagtgtttggatcattcccctggtcaggcttgtcatttgccactctttggttagaactaataggtttctcccatgtcacaacagcgaccctttggaccctattcatagtcgctgcttcatttgggtctctgtttggagggtggatgggagattttttatccctacggttacccaactctggtagaataatattgtcacaaataagcgctggttcagtcattcctttagcagcagttttgctcttgggattgcccgatgattcatccactgccttcatgcatggtcttgttttagtcatcatgggattcacctcagcctggaatgctccagcaactaacaagtacgtacccataactgcaatagtttatgactgtgttctttatattcaggattactagaatttaaagctgtaaggatttcttgtactagtagtggcctcccttaataccaaatatatcttggaattagtagaagtgttttgaggcacccgggtacactaggagaaattattaccttgttctggaccactatgatcctagtcaatctccacatgacacataatcgagttttattaactcttcttttagattgaaaaactcgattacttattaggtaaaaattaactaggaccatggcaaggtagtcccaaaccatatgataactttttgataggtcaaacacccaataagatgagtcaaacaaatttttaaactttttagctcttactcctcttagctgagggagtggtgaatctcctgaacctgtgactgtataatgattgctaccttttctatataggtatgctagcagcatttgtcagaataaaactttaacagtgattaattaatgatccatctataattgttccaaaattagtgaatagtgacgaatgcataatgaaagtatgaaagaaggttgttgtagactatttagatcattaatcaccaaccataatcaaacatttaccagtagagatacatatatgcaagaaaaacagtttgcaggttgtttttctgtcaaactaaacaaattgtttaatacagcctgcaagatgtggaccttcaaactaaacaaactgtccaaagtaaacaaattgcagctaactattgaacattgattaaaatgcaccttgtttagttttctttcaaatgtaacagtgtagacagtccaatatttgcagaaatagtccctgagaagtcccgaaccgctatatatgctttggattgttcttttgagtccatcttggcatcctttgctccacctattgttggactattggctcagcgtgtttatggttacaaaccaatcccaagcggatcctcagattctgtggagattgaaacagatagggaaaatgctgcatctctcgccaaggcactttatactgcaattctaatacctatgtcaatctgcgtctccgtatattcattgctttattgcacgtatccaagggacagggaacgagcaagaatggtatcattagaggaatcagaaatgcagcagctagaagtggaagatggcacaaaagaagaatattgcgaaattcatgaatatttagagtcaaatgtggtgaatggcaaggaaagtagcaagtttggcattgattatccaacaagggaagagagcgtcgacgtggatgatgatgataagaaagttttgttgtcctagtatttcacttttgcaaggaatcagtggttcatttatcaaatgttataaaaaaaattgttgtttaattgatcaaatgttataatgtttactgttggataaccttttttttatattggggggaattggataacttttttgattcaacataattagacaaacaggggtgaagcttatctgttaggtgactccggaaactgttgataccatgtattttttgacaaatggatcatattcaatcactcttgaggtctcaaaagtcaaaatcccatagcacctagcatggtgatttcactttatgttagggtatcctaggctagatcctttactgctgcacattgtctcatgtgacatgtgagaagtcgacattaatcaagttcaacaaagtagtcactctgggcaggtgctagatatatgtcgtcttcttttttggtgaaaataacggaaagatatattatatgtcttctaaattcaacagtttatcctgattcctgaggtggctggggaagtttagttttttttttcccacgtgtatatcgttttaataagtaaacttttcttctgtgaattgtaaggatatttttaaacttaaatcaaatttataaataaaaatacattaaagaatataattgatatttttctattaagcttaacatttttagtttcctacgtgtgtatatcgtttgtaaaaaaaaaatctgtgaattgtaaggatatttttaaatttaaatcaattttataaatttacaaataaaaatgtattaaaggaaataagagatatttactataaatttgacttttgttaattaggttatcttgatgaattgattagcactagttgtagacaggaatgttatataataccaaatatttatgtacaaatgacacaaaatggagaaggggaaaatttaattggtttttgaataaaatgtataatattagatgagtactctccttaacaaaaatttttattgttttaatcctcctttgatttatcaggggaaggaatccgaaattcagtaaaaaataaataaaatctaatcaataattattttcgttaaaagactaaatttaaagtattattcaaataattcaaccttaattttaacaagatttaaatataagaagaaaaaaaacatatgtaataaatcttaactaacttcacctttaattaatgatatcatctcaaaatattttttatttaagttgtaaagaaataagatcgagggaaagaaataggtggcaaaataaaaaagatattattgaaattcacacttttattatttccttgttgatatgcatagaaaatagaaattgcacaatgcttgagtctttcgtcactaatgatagattataaagaaaacataattgattatcaatgtcattacacattaaaatagttattttactgctgataatcaattacgaagaattcataatttaactatcagtgttgtatttttactcctctctcctatttttctcttaaatctaacgcttctatttttcctctattttgttcatatttctttcttactaccaaacatacttatagaaagaaaaaaaaaaaaaactaaatttcttaatttaagatataacgttttattaaaagacttcttatttgcatcaataacagcgtaaactcaccaagtgagatataggaggatttgttaccatgtggataggtaaggtatataattgtaatgcttaatgttcaccttagtgtaaatgtaattgttaatgttaataatacacataatttattttaaaaaagatagatgaattggattatgagaatcaacgactgaagagattttagattttatgaattaaacaattggtacgcatctacgtattactcataataaaattctcattttaagagtaaatttaaactcacatttgataagatgtgaatttaatccttataagctgtatcaatcattattaaaaataatattttttttatattttcttacattataaatataatatatgagatatttgtttttctttttttctgatttttgggatgtttgttgttaattataggaaatgtaaaaactatctatccatttataatcattgtacatttttactaatatagtagtagtactgtataatgatacgtacataacaatgataacatgtgttcccttctcacgttccatatatgttcaggcagttcagcatctatgaaacatttattagattgcatcgtattccactgacgtcaatctcgacattaatattcaccgcatttgtagtatattttattattattattagttaaatattttgaaaattataagtaagattcattagataaagaaaaatgtattctcttaattccctgctacaaataaatcaagaaattattaattgatgtatattgtgactaacgcttgcctactaccttcacatttcatttttagtcgacataattcaaattaattgtccatacagttgttaaatgaatgagaaatgtgactgaaaaagttataattttttaaagaaaaagtctacagaatttataattttggagtacaagaaatacatcatttcgagaatttgaataaatctcagttaaatatacatatatagttaaaagaatatattaaaatacgtgttattgacatttatcttaatccaatttagttttccattcaaaataagatttttataatttcaagagttaattaaagtatactcctaagtcagtatattactcttgtttctttgttttgtgggcattttgagtaacaaacttactgaaattaatgagttattttttagtattgacctctatgatctatgaatttgtctgaactcgaacaagtggatgatttttcacttattttatccagaatataaaaatgggacgcctcgaagagagtatcctaaataataaagcacttgggatcctctccagcaggcttatagtgcagtcaaatctgacccgttgaatggtctctaacacagtatttggagatgagagataacataatgtagggtagagattaagacagagaaagtgaggcagcaatagttgcgggtcagataaccggtgagtttgtttgatttatatatttttttagaaatagatagaatttattttttaaattaaatgaaaaatattttctaaataggaataatttagataaatatactaaaaaaataaattttttacttattttattgaaataaatatttattttaataaataaatttaaacaaactaacacaataataaatcgtaaggcagtcatgcgcgccatgtgataggtttccttctcctgccaactttggcagcacacacttccactctcactcagtccattttccacttcactacccataaaaactataaaatcctcccttcctttcctctctcttccgaaatctgattattaaattcgcatgtgagtgttctatatatgtattaattactacatatagctagatcttagggagcgtcctctgtttaatttgtagatcttgcttgacggaaaatattccaggataccaatggctcaactcaatcacagaaaggtactactgttctatcttcttttgttcctttctgtttctgtttgcttcagtgccacctggttggaacctcaacatagtagaagaacgttggatgccggaaaagaagagcaagagaagcctttgaaaaagaaaaccaccacccaatccaccaaaaacaacaccaagcccaccagtagtatttcctcaaagaaccaaaccaaaaccatcaaatccgacaacgttatttcctccagaaaccaaaccaaaaccatcaaatccaaactcgtttcctccaaaaaccaaaccaaaaccacaaaattacccaacaacaacattttctccaaaaccaaaaaccaaaccaagccactcaagcctagctccaccaattcaccttccaaaaccaaacccaccgacactcccctcagcaagaagctcaatagtaagatcaagaagctcaacgtcacatcaaaatccccaccctcaaaacccggcaccaccgtttccatttcaagcaacaagaaaacattggatctcgcgagacctactaacaaaacaacaaaagccaccgccaccaacaagcaagccaaaacaacaaaagtagatcaaactcacgacgcaacaacaacaaacaagaaacaacaaactcagaagaaacctacgaaacaaaaagcaccaccgagttggatcatggaggagctggaagaggaaggcgatgatttggtttcagagttcacagatctacccaacaagttccaccggacactcctccccgacctggaacgaatctccaccacttccaaagcctacatcaccaaagccaacaacgaaatgaccaaaggcttcaaaccctacgttggcaaaaaatacgcacctaccctcgccaccattatctcttgcgccttcatactcatccctctcctcttagtctctctcctctgcacaagaatcaaagcctatttctccctccagaagatcttaatcttcatccaagtctatctctccatctacttcactattctctgtgtcacatcgttcttcaccggcttcgaacccctcaggtttctatactctacttcgcagtccacgtatctgtgcctgcaggtgctgcagaccctcgcttatgtcttctacttgctgctgctcctcatgtacctcgtgctcgtgttctccacggactgtggcctgacctctaagttcttgggcctggcccaggtcttcgtgggctttgccgttgggctgcattactacgtcacggtctttcacagggtcgtgctgcagcaaccgcccaagaccaattggaagatccacgccatttacgccacgtgttttctgctcatctgtgtgcttgccagagctgatagaaggaaaaagacttacgtggaagacggtggaggagaaggcaagaaaaattgattgagaagatacctttgtatttatttattttatttattattattattattattattttcattttcatttgattcaattcaataattaaatttataaaaaaagaaaaggcaaaattgcaagcttctttaataaataagactacgtacatcatgacaacagcagtttcatgcctccggatttagatgaaaacatagcttatcttttcttatactctctcttatttgagcctggaaaatggaaacagaatctgcaaagtttacttattattcgaattaaattagactagagtatttattagcaaagatttttttatatttttatttttcagttaataaaaagagtgttgactgtttgacttctttgcatgaaaattttcaacttggacaaaggatagtataaaaagccgaaattcacgaattggattccctatggttgataattggtctgaaatgacggtgatgagtattaaaaggaacttttctgcttcaatttaatataaaagtaaatcttttaaaatattaagatttacccagttaaatatgtaattgcggaagatctcgattcatgaaaagcctgaagataaagaacgtccaactaatacatgtcaagatactttttttctatttatgagaatgagaaggattcaacgaaattagcatccttaggttgataaaaaaatcaaaacaagttatgacatgcacgttagcgtcccttataatagaacagtagttgttagtggattaattttgtaaattttttgcatttagtataaacaaaattaatctaataaaaccaaatctagaaaagttaaaaattgatctaagaattatagagctttctttcaaaaagcataggacaacatgttttggaaacgaaccgtgtcttgtaagttttaaaaatgttagtatagtgaaggcagttgctcccgttacgggtaattagttccaccgatgcaaataaatacgtagtactgtagtatttaaatttgtgtagataataaacaaattctaaatgaactcaccaatatgttaatatcttagcacatgatttatatgattatttaattaactttactggctttgtgggagctggtaatgtaaccaactggagtttggaaaagtgacttcagttatttaggacagaacagcctgaatccagcctcataaagtcatagtagtaatttgctgacacttttcgtaaagaaaccctcctccaagttggtgtatagtgattaaattctataacgatatttgaacaaatacttaattttagttgtttaaatatttacgtttcattaatcattatattaatatctttagtctctgtaattaacaatttttttttaaaaaatccttaagattgtaacttttctcattatattaatttttatatttcattatttttatgtagtgattaaaagtattttaataaattaacaattattagaatatgttttaaactaaatattgaataaagaaatcaaattaacaattaattaatctaaattttttaatatatatatatatatatatatatatatatatggtatttgtactttttttagattttgggtcgacctcttcaaagttcacaattcatgactgatgtactataagcctattactctaaggtggaagtctctaaatcaatctctttaaagatgaaaattctctaagccaaactctatattggtctctccaagactaccttttcgggttgtaactataccttctgagacccagattaaccaaccaattttagcctaatgtcttgcacataaatgctggccgagaggcaatcaacccatgacatgggaaaaccactcccaataatcttagaaacagattaagatacgaagtataataaattaaaatcctaacactgacctagggaaggatgtatcacatactcaaatgctttggataggtcacctctattcctggttgaggattcctatactggaacaggatatatactaagtaatacaataaaacatatagttacaatataatactgatgaaatgatttatttaaacatatatttaaagtatatatttatttgagcacaattagtaataaatcgagtttagaagacaatgtgtctgtcgatgctcttgctaatatgtttatggattttcatgatatatagctatgttttgtttgagttagccctttctgggctttgttctttgcttcttttttataataggggagtttctctctcctgttccgtaatcctataatttatttttggacataagtcccgcttgtattaaaaagaaagaaagaaactgtaactaatcctttagttaactagattttagatgaaatatttataatcttaataatttaatctatatatcaaatttgctcattcttaacattttatttagcctattttaatataatgtgatttgaattttcttcgtttaattaattttaaaattattgaaattgccaaataaaaaaccattgcattttatggtttataaattcgaataaaagaagttcaattcaaaaatatgaaaaaaagttaataattaatactattaaataaatgcatatattcagtttaccttactgtaagtctttttttgttttgtttgtttttttacctacggattagttatcctacccgaaggcccggagacagagacgtgaagagagcataggatctattctagccatctatctctaggtctaccactaaccttcgaaccaaaaaataccaaagcagatatgactcatggttacctacgcatataataatctgttcctgcaataatttagggaaaaagaaaaatgcaaaaaactgtaaaattaggatttaatttgacatatttttaatgagaagttattggatacaattgtttgatttttataaaatatttttttaataaatttatcctgtaagtaaacattttagacatcatgacaatacgtgataattagatgtaaatttaaatctattatgttatttggatgaaaaaaatattatatgtgtctatgagaagaaaaaatattttctattatgttatttggatgaaaaaaatagaaaaaaaatatattcaaaaatatttaaactttaagatatatcttcaatgctttttttttttcatgaataacacgagcaaataattattttcttaattttctttttattctaaatgactataactactttttacttttttatgtataatagttgcactgaaatttgaaattagaacttatgatttcatgcatgttatttaaattgtcattactggttcaaatctaacagtttaattgaaattattttgatatatttattctactcttcagaatattttttattcaatattttcatcgttttgaatgttgtcttaataattttgattgattaaataatatatcaggcttattggattatgtaaatatattatgattaattaggactataaatgtttatattaacattgcatcaaaataaagttatacgtgacaatataggttattaataaaaatgatgatatagttgattttcatagacaaggtgggtttgagtttaaaactcacaaacccgcttaatctgcgggtcaagatagataattagatataaataaataaaatactaacagtgaaaaacagcataaaaacttatattgtcagtttattttaattacttctttttttatttaagatttgtcatttataatttaaattttccatttcttgaatgatgatttagaggaaaatatctacatgaattaacttgaaaggtgtgcaatttttggttaaaaaaataaagtgcacaaatttttgaaataattatatggttacatgtttgaatacacgtctaaatgattaaaacatgtgtggttgatgtgaatatatgaagcttttcattaaaattttacgtcaaaattaaaattgatgtgattttctaaaaaattggacgcagtgtgataatcacatcaatcgagagaagaaaatactactataatctattcaatagtattattaatattaattaatctttcataaagaataatgtgtactgtgtcattcaaatcaaatctttcgctttttgatttcttcttcactgtcactaagcgtgggtttgaatgttattggcccatatcccatgcacacttcaaaattatacgctagtgcgcaattggccccattgatggggtcacgccgaaacacaacccatacaaatagcggaatgtacgagggaaaaaaagaaaaactaattattgctgtgttactacgtagtaccctatttttttccataaaaaataccaatccaactcgttaatattttatatataaaacttttaggaaggataaatataaatatgtaagttacaaaacaagtaaaattgagaatttgtgacggaaattatgccacctgattcctgaattgtgtatgatttttgtgtaagtaaattcgggttaaatatcattttttaatgaggattttatattttgatttattttaaattcgattatttaactattttattgttttttaataataactagctctttgaaaaaaacttctcaaacattgacaaaaataagttgctattttgattctccaaaatattttaattattttattataaaaattaacaacattagaacagttcttatgatcatagacacgaatagggaattaatttgacgccattttttttatataattgatagtatcgttttcaattattagtagactaaattatattcacaataaaaaaataatggtagtattttcatatattaatttttacaaaaactaaactaataatatttttatgatcaagaaaataaattaatattctttttaaaaaataaaataaaataactttagaaattaaatgaatgcttaccttcccaaatttatcatgtaaaagtaaacccaaaattttgtgaatatgattatttttcgttatcaatatgtcggtacaaattatttttcgttattttgatgaatattttatcttttaacatttaaaaattattattaatcaactaacctttcaaaattaattttcaagatttaagtattagattaccgaaataaatttaatcttgcattgcttttttttaaaaaaaaaaatgttgcattgtaggcctaactatcaacaaaacaaatacataattggcttaaagtgtttttgatatatgtaatttagtgtttttatttttttttaaatcattgtaattttttaaaaattattgtaaatcatgtttgttctattattttccgtaaaatattttaaataaacatttttttttatttaaaacattatctaaggaactttaaaaacaaaaagtaaaacaacaataatttttaaagactaaacaaaacataattttacagagagagaaaatgaattaaaaatatatttaagttctttatttattcatattgtgatatatacttaaacttaaagctactaaaacaggattaaatatttcataatttttaattaaataagagattgtaaaaatatatatttccttcacgtaatcacaatagaaaaatttgttggtgacacgataacaatgtaaccaagcactgtcactaaacactagactgttttttttattattattattattgaaactagattgtgtcttaaaaataaaaaaaaaatatattaacatcataatattttattaggataactattcaatttgtccctaaaagtgtatttttctaatatacgagtttttgaaaatgaaaaactatttttttatccctaaaattgtaaaattgtcaatatagtaattctctcagttatttcatttcgtaaagtctaacgtctttaacgtgacaagtgaaaattgaaatgtcatgaaaaatattattaattaggtagttgattcgatatgactaatttgtcattaaaatgttgatagattaatttgtcttctttttctttttttctctttccttttcttctctcctctttcaccttattctcttataacttattccatcaatgaccttagcaatgatgatgatgttgcagtgatggaagaaaaaatcaaattatgaggaaggaaattgaatctcacgctctacacaaaatataatttttgattaaggggtctacacctttgcacatgctattctccacacgaaatataattgcaactagatttttcttcaaattaaactaatccaataaaccaaaaaatcataaatcaagaaattgcaacaacaaaagaaatttctttgtctattcttcaggaaaaataacaaaagggaaaggaaaacataaaaatggttgagaattaagcaatgtataagtttgcatgaggtgatgttgatgggaggaataagatggatagtgaagagaaaagagagaagaaagaaaatgcagagagaaacaaagatagtcgaagtggaaatggtgaaagttggatccttgaaggtcgaatttgaggatttaccactatgatgtcgttgtttcaaataacacccgcctctaccaacacaactttagcaccctcctcttgcgccagatcaaactccgttgtcaaccttctctcaaacccacaatccttcgtcacatgtttgcccttggcatccttcccaacaaggccaccatcaccattgtcatgcgcattgctgcaacgaaaggcaattttggatgacacatttgagtcagtgaagggcataaacaagtgcagcaacacttctccaaggcttcaaacctacaaccctgcgttgttttgtttatgaaatgtttagtgttgaggagcatatgaatgaggttggattgagcttggaggaatgagaaatggtggcacaataaggaatgggttggggagggggattgagttgagcataattaggttgattattttctaatgacgatcaatgtgttgttcaatgagtatgactaccaagtatcaatggttagttgtttggtttggatttggtttgtgggtaaatgatgggattgtcgaatttgtagatttgattggagaaactgaagggaaataatcatgagaaatatcttttcatagtggtaggcaatagtacaataaaaagagaagaataatggaagaaaaataataaagaagaaaggaataaataaattccaaagatgacaatttttttattgatattttgatgacaaattaatcctttcaagttagctatcaattagtaatcttttctcataatattttagtcctcacttgttacgtcaagaaagatgttaaactttatagactaaattaatgagataactaatatattaacaattctacatattaagaggcaaaatttagtttttcatcttttagaaacttacatatcaacaaattatattttcacatatgaaattttagtatttatccaattttttatttatcagacattaatgtcgtaatatttcattagtatttttttttcttttcatttctatttagttttccctccctccatcaaagaataaaataagtaccaaaaactaaaataaaatcaatcatttaaaatttatacttgaacagtacagtacagtgtgtagtagaaccccagcattattccgttgtcttccttctccgttgctcactctctttctctctctctctctctggaatattaacctagatcaaagatgacggtgctgtgagaaaagcgtgagtgagaaggagagagccaaaaatccacaaagcatccgaggaacacgtgaattccgacatgtaacggccgaaagttgtaacctacgacgacgaatttggatctgtcgtttacaaccattgccgatctccgccttaaacgacgtttcactgaaaccaccacactcttcctcctcaccgttacaacttcacagcttctgtgtagtgttctacttttcccgttactgtcagaagaccgttgaacaacgagggtaatcttatcacccacttttttcttttgcatgtagaatcgatttcggccatcggaaaaaccgtttgtttctaatgcgtaatcgattccgcaacacaacaaagacaaaatataactttttttttttttgagaatttggttgacttatatgggaatgttgatactgtgactggtttgtaggtactagctaggtagtatgatcctcttcttaccctatctctttccgtgattcactctgggtttgacttttcatgtgagaatatttaagggtttttctgtttcagtaaccactgtttctttacccttactatttcagatggaaaaggaaaaaaataaatgttgcaagtcagtgttttttgttattaattaaagtgtttgatgatgtgggtgtctttctttgtctcttttaacgctggtgcggaataagcacttaaaacaattttgacttgtaatttaattttcatgatttgtggttgtattatgtagtttggactcatttgtggaattagttgggcatttttattagggcatgggaaatggttgtgaaaagaaacgatgctttgcattttttttttttacttattctttctgagaatctaatgttgtttagggaactacagatgcattggtcttttgggtgctgattactgatctgatatatggcatgtgtgcagttttgaagtggttttcttgcttcagctacccgatgaggaattgatttgttgatctctgaggttgttgttctaatttatcgagcatggataaagtttcatcagactgtccgtacccgggatgcttcttttgtgtcatgaaggaagggaatccaagcaagcgcagagcaagtgtactgaaattctttagagaacttccgtgtcaagatgatgatggtcaggttctccctatcagtggcctttggaacaccgctatggcacacccaaatgacccggagttcctagagctaggaatattcgaatgcatgtctgctctcatatggaagggactgaagaacaggcgctggctttctcatgaccaaaatatatatattccttattatgcagctcatatcatcggttcctacacaatgaatatggaagaatttgcagaaagtgccgtgcatgctggggtcattcctcctttggtcgagcttttacgaggtagattaacttgggttgagcagagggtggcggttagagcattgggacacttggctacatatgccagcacttttccagccatagcaagtcatggtgaaattcttgagctctccatccaattggcaatgagttccctggaaatagtttattcacacttttaccaatatgttgatagaaggcttagttatcattgtgatctgcttacacgtggcatgggtggtgttgaaatggagtccaggaaggctgaggaatgggctagtcagttgcagtgttggtcccttcagctaattaattgctttgcttttaaacatgaatttcttcctaccatatgcaaacccgaatttctgataaaactacctggcatgtggggtggacttgttaatgaaaattcacctgctggtattggtttattaagaacaatttgtcatcaaaagcttggtaggggacctgttgccagttgccctggtattattgatgcattgtgtaatattgctcggtcttcagatgattggcagtatatggctattgattgccttctatggctgcttgaagatcccaatacatgtcacaaggtaaaacttccatgactttgcattggcatctggttctgttacttcacatctgttgagcttgtttgcactgatgaacactgaggattaaggaatactattgtctgggaaagaatgctttgattaacatgtgaatgaaagttgactcttgtgccttaaactaacttcaattaaagaaaaatgaaattaagaacagctgttatgcttaatctcaagcacttttattaggcatggaccttcaccttgagaattatcacattgcttgcctcttttttgtatttctccttggttcaaaaagcttttcaatttctcaaatttcattgatagttgaggtctgatgagggaaatctactggatgagatggtttctgaatacaagaatggtagtccgttgagaaggtaataaagaatggttttagctaagtattttgttttgtatagctgtttcatttgaacatctaaagacattgctgttgggaataatatttcaagctcgtggtcatgtgtaggctacttacttaaaactagttattacttccctcaccagtgtccccaaagaaggtggctggtccttgtcaagacaccaatgattttgtaaagtgtaaactagatgcatactaacaaagtaacaataccttgtgtcaaagaattactcatttttaaatttctccttattggcctgatgctttcatttatacaagcaccaattgctagagattatgactatgagtttacatcatttgaatattgtaaattgattctttgtttgataaggccttggtatgtattatgtaggtgattgataaagtggtgcctacattagttgaccttgctgagattacaactctgggtgatcataaaaagcttggcgattctattattaatgttcttcaagagtgcatccagtctcaagggtcaggacgaagctcgattagtagtcgtactaaagaacagattgaggatattttgaattccaagcagagattaaagtgggaaaagaatatgcccaaggaagatctacatattaagcaggctgcagcgctggttgtcaagcttgaaggaaattccctgttctcatctggaaatattgctggagctgcatcaaaatactctgaagctttggcattgtgtcctatgagatcaaggaaggagagagttgttctatacagtaatcgtgctcaatgccatcttttgctgcaacaacctttggctgccataagtgatgctacccgtgcactatgtctccataagcctgtcaatcgtcatgccaaaagcctttggagacgagcacaagcttatgacatgcttggattagcgaaggagagtttattggatgctattttatttataaatgagtgctctcagtcaaatgatcctgatctctcactgaggcaaaataaagttccagattatgccgagcgtttagttaagaagcagatgcgtgctgcttggttatttcgagaggcagctattaagcatggtggggtccatagtcagggtgatggtggtgatatgtatggcccagagactgatgattctgaatgggagacagctagtgaaagtgatataggaaatgatggacgggatgacatgggcgatgacgacgatggtgattggaataatgatgatggtgagaggaaagattacgacaaaccctcgatgaaaggtattttcactataaatttcctatttatatgctttattaataatttccattattatgtgatcctacttcgtgcttgtgattatgcatgtttaatttggggagtggggactgaaattggctaatatgccaaagagtttgcattttaaagtaaaaggcaaaaataataggtcctatcaacttgaaatatcgatatgcaaattcttgtggatgacattgttcccacccgaaaggaacaccaactgtctatttgggaaaaactgaatacagcaacgttaaacttttcagtttgctaaaatatgtatatggtagagatttatcttcattgttggtttcatgtgtatataatctgtatctctcagctttagtttcgacttttagacttcttgaaaagaataggtcctatgcgactctggattttgggtaaccagcctttccttgtttgtagcatcacttgaccacccttcggaacgctgatcatcagctgaattgctgaaagcttgtgctataagccagacgtcctgtatttgccttggtacttgtctgataaaaccattgaatagttcagatcgttgccctttatatggttagtcagacaggctgtgatttatactcatgcaaacgagaaaatttgattgaataggttggacccagacttaaaaagaaaagaataattgttggaaaaagttaatatgctattgcttacaaaaacaactgagcccctaatcttactaaatcacatagtttttaattactgaattaagatgcaaattgcaattattatatatggcatctttttgcaagtggtgtaatgcctaatcctcaaaagtttggtttcctccagatataaagcatggatacaatgtgcagcttgcggaagaagaaccttgacatggtaatccttgcatttggtgcaattgttctctccagcacgaatgaagcagggttggctgctgtgactattctaactctacatgctttgtgggctttaaaaagagaaaattctaagtcgctcgttgtagtaagtggcgggttgaaagtgatgagtgagtatttggtcttactattatttgaggttgatattttatataaagttttccatgttccatatttgttctccccattttccttgtcaagtgtaaaaattgaagattttaagtttggagaactacatagcgtttggaggatgtgaagtttttttttccccctttattttccccggaggtttgtgtatataaatcctttgtgcttaagttttctgagtccgtttccactattattttggttgcagtttgcctcattatttgtgcatgttatagtttctttcatccattgtgatgattggtttctaatttagaaaataatcttgttctttaaattcttttaaaaagctgttgaaatttattattttttaaagttaattcaaacatgtattaattgaaggtttaaataattttttgtcattgtaatttagtgtttttttttgtttttagtcattgtaaattatgtttctatttttagttcttaaaacaatttaaataaaactttaaataatgaaaaaaaaacgttatctaaaacgtcacaataatgaaaaacagaaaaataatttacctttttaaggactaaaagtaaaaaaaataaattaaattgtatgaattaaaaaatatttaaatcttaattaaataataaattacttaatacatcaatctggactaatagaatttggtttttaaacctaaaggtgtctgtgggataagatttttattttattttaggctaataaataagagatgccaatgcggtgggacaagtctggtcacgtgcatgattgctaattggcattttgagtagtgatatctaactaaccgatgaccaaccgactgcctatatttttatttcttttggcatgcctatctcaactattattattgtagctccagcaatgtatttctgtccattcttatacactggttctcaatatttataaattcagtacttttcaacatttatatttgtttcatttcagtagaactaactcatgcatagtaatctaattccaaactcatttaaaatattttgaaaacaatatttcttataagtccaattcgaaatattgttttcatttattattataagccgctacttatgaagtcatgaaacgcacaggtgtaacattaatataaaggtttgaattgaatgcgttgggtgatttcttccaatcaatgtctttaaaaagttggaaacgggttggccgttggcttggtgcttgttccatcgatccacaaattcttaggtaagactatttggttctgtagaaaaaagaagactatttggtttttatgcatgtacttttaaaatacaattttgttcgttatcaagaaataaataaataaataaatattttaaaaaaagataaataaataaataaaattgtgttctttattttttttaataaatttgagataatattaattattactttaaattatatttattttttaaaatattaataatgtcataataaaaattaaaactaattttaatataaatgaaattatgaattatatttgtagtctatatattatatttcaaaataaagaaataaaaaaggcacaaagataataatatttattattcaaaaaattgaaatgtgattgttttaaagtaagcaaatgcaactttgtttgtttaaattttaaaaaggctattttataatataattttttaaaaaatacactagttttattttaaaaaatattaaaattctttaagagcaagtgcacttcaatcatatcctttattataacctaaattgtcattgacagagttttttgaattatatatacacttttaatatgctacatattcttatatcattaaggccaatgtctatcttacttttttttagtgcaatcactatcttacttttcttcacttatttctttaaactaaataaataaacgcatattttcttactgatttgagaaacaagttcattttaatcataccttaaaaaaagttcactttaatcttatatcatcctttgttataatttgaatttattgttagctacattttattttatgatttgacatatgatagttagaggtttgaatctgtgaattaaagacacatttttaataattggaaacacaaaaatatactaatatagattaacccgacccgatttgtcaatcggtcatggtgggtagagaagaagaccacccgtgtggaacacgttggtatattgcgttccacactctaatccctcgttcgcacctatcttcacatatctcatcaattctctcttctcttcggttaggttctaccttgttcgtcttttttgtctcagtcatgttagtgttttattcttaactagatatataattcgcgcaaccaaacacgtacctcataattcttaaacctccttttctattcaattcaatatcagtggtggtgactcacttgttgttggagcaaagctgcgcgtgatcaattttcgtgttccttcttcgttcccagcttcattcaccgaatgaggattaattatcgattatatattacatattaggtttgtttgacttgttttcgtttatgtgaaaaacgatttctctattgtatacaacttcggatgcgcttatcgagcttttgcggtgatcaatgacgttattgcagaatctgagatgttgctttgatcgctgctgtggacttactttcacgaacaatcgaagatgctcgctgttgttgagctagaatattctattttttagcaaatatgttctacgcgttggattggcggagcatggttaacgtttttgaccttgaaggtgagctactgttagggatttttacacatttgggatctgctatggaccaatggagagttttatgttagtatatgtaatattttgactttgaggaaatttgtttgcgtatatttttgtttagttatacttaataatgagtgatatctgatttaaaagatacctggttacgtggctgttgttatttaattatgcttttgatgtgatgaggtcattgtttggtatcttgaactgaaacaccatgttcacaaaatatgtgcatatggtttgacatgtatatgggaacctcaataatgtgattgtgtaagtaaacgagcatggtgcatctaaagaatgccactttgccttgagattgaaaattcccactgttctggctgctgatctgtcattcttctgtgcattttaaatttggctagattttgttgccccagaagatatgaggagcaattgtgacacgttcatttgttggtaaaagagaggttgatcttccgccatgtcttcccttcaactgttccaactaactcagcatggccggagttttctggcttcaaggaggtatattaactttttctctgaatgtttttggtgatgagtaagttcatttagatgttgatgatgacttgccacttaatttgttttcctattgacctactacatcaagtttatgcttttatcaacttttttttttcccgtaatggctctataactaaactttgttttatgcttgaagagaatatttgatcacattctcataatcagcaatagaatacataatgctcaaatctcaaaagtttgatcccttaaagaattgttatggttattttagaaccacatcatgaccacaattgcatttgcatcaaccacatttatctacaattttctgcaatatccaggtttttccgaaattgtaattgcaatcagtcaaccacaatttaaaaactttgcaacaatgctcaatactaatacgtttgatccaaaaaatactgaataaataggattagataatggtttatgctacatcaaaatccctgtgttggaatctcaagacctctaattctacatgcatttcaatccttagaaacagatacctgataagtattgtagaaattggtaattatcaagaattttcgttagagtaaactggttgacccttaaacttgccttctttgggtatgattttccacctgaaacatatgcttaaaggcttatcattagagatcggaaaagctgcaaaatttgtcctaatagaactattgttaagaaatttcattattctttattgatctaaaatttatttctctaaggtcctgcttctttaagggaaatgtatgttgtggttgattgattttggatgaaatattgatgtattcttcttgagtttaacattgttatcttacatttatcagataaatatttttccacttcgattatagccttgtgtcttcatattagtagtagtatcctgtttttcattatacactaatttgtttggtattaataaaatcactacaatgttgaactagttttgcatgttatttttatcttgtttattcattgtccttctgcgccagaaaaactttgctacttgcaactggtatcttagttgctggtggaactgcagcatatgtgcaatcaaggtttagaggtaatagagatgatttattaggtgattcctatgagtccaataatgataaagaactcacaaaggaggaggtcgtgaaaggaacttctgcaccaaagaataaacaaaagaaaggagggttgaagtcacttcaagtccttgctgcaattcttttatctgagatgggccaattaggtgcaaagaaccttttagctttagtttctatagtggtaagtctattttgttatggatagtatgctttgtgcttatcttcaacatttcaatgcacagttgctttatgtattcatgtatttgttgtgatattttactctgtcaacttatccttgagattaaggggtcaatgacggactttgtgaggcatcattcatgaacatgtcatgtatacccactatgtagacatagtagactgtttaagtaaattggggaaaaagagattttttttttttttttatttgaatagaaaactacagtagactgttcaagtttgtatgagaatagatgtctgaatatcaaaaaagaaaatgtgtttgttgattcaccagaaataaataataatgatagtcaatgacatttaaatttcacatatttgcaggtgctgcgaaccactttgagcaacaggctagcaaaagtgcaaggtttcctatttcgcgctgcttttcttcgacgtgtgccattgtttctgcggctaatttcagaaaatattcttttgtgtttcctcttatcaaccatgcagtctacatctaagtacattactgggactttgagtctgcacttccgtaaaatattgactaaacttatccattctcgctattttgaggtagatattgttgatttgtatgtaaaagcttactatatttgattgtctgtattgatcttgttatccatttatgcattcctcctgtcatatgaagtgtctgtatatatactcgtgaactaaaatctttccgagttgtttttacctgtttataaggcttgtctgttttcttcttcatttgcaatgtatgaaagttcaatatgcaatgctttcaaaaatttcctgttagccttaagttctgtcatgtctttatacttcttaaagagaacaatagttgttacagactcttaatcagctaggtacatggctttgaacttattaataattaataaaaaaagaggtcttgtggttcagttattcttgttttgggcatagctttgggatcttggactggtcctgactagagcatttcagttttaagctatccttccaggtgctttgtactactgctcaatcttttcccaaaataagagtcattatccagaattcatatatggggcttgctaagacgcacacaccattttttcagttggtgtgtaatagcaatgtgcaccaaaaatataggacagaaaagccaaccttagcttttattctaataaactccttttaggatactatagtaatttgagataaattcttttttttttttaaaaaaaataaggaaaaaattgcttctctctcctaaacaatgtttctccccatgtcggatctgcactgcaacctcctccgcaacatcctcaatcgcggcttctgttttgctaatttgcacgcaacacggttttgctgatatcttctgcataaatatggaactatctcttgctagtcattattctaattctcaccatatgcacacaccatattaaatttattttcacaatagaggtgaaatgtagtgaggtcaacacatgccctgttgaaagcaaagtagaaaaagagagatgaatcctccctgagaattttcgttaaagacctaaaatgttaactgagcgtgactacatgagggagtaggagagagaagacattttttttctttattttttaaaataaattatctcaaattactatagtatccctaaaaagagtttattagaataaaagataaggttggtttttctgtcctaaatttttggtgcaccttgctgatacacaccaatggaaaaagtggtctgtgcgtattaacgagcccctatatatataaattgcaagggtgccaatcaccatcccatgcactattgcacatatttttggtggttataggaagagtagtccatgcgtcatcaaatgttataatgttttatttagtttttatgtcagctttctgtttatcatttacttttatttcagaacatggtgtattacaaaatatcacatgttgatggtcggataactaatccggaacaaagaattgccagtgatgtgccaaggttctgttcagagttgagtgagattgtacaggatgatctaactgcggtgactgatggactgctatacacttggcggctgtgttcgtatgcaagccctaaatatatcttctggattttggtactctcattaaactgtactgtatcactgatttctcactggcagctattgttcataattttgttttgggttgctgatggctggagcctgtttgatgtaatcttaagtttagttgttgtctttttgataactgttgtttccctgcaggcctacgtacttggagctggggctacaatcagaaacttctctcctgcatttggtaaacttatgtccagggagcaggaattggaaggagagtatcgacagcttcactcgcggttaaggactcactcggaaagtatagcattttatggtggagagaggagagaagaagctcatattcagcagaagtttaggaccttagttagacatattaatagagtgctacatgaccattggtggtttggcatgattcaggattttttattgaagtaccttggtgctactgttgctgttattttgatcattgaacctttcttttctggccatctaaggcctgacagttcaactttagggcgtgcagagatgctaagcaatctaagatatcataccagtgtcattatttccttatttcaatctctaggaactctttctattagtgcaagacggctcaaccgactcaggtatatttgactggtcatttgttcctttagaagttgatattagaggacatgctttgatgctattcctttctagggtttattttttttgtatacaaatattctagttatctgtatgttttacagtggttatgctgatcgcattcacgagttaatggccatatcaagagagctaagcctggacaatgggaaatcttcactgcaaagacaaggaagtagaaattacataagtgaagctaactatgttggattttatggtgtcaaggctagtgaattctgctgaactatttatgaacatttacttctatttatgttttcatatcttgattgtggtgttgctcccaaaattcaggttgtgacccccaccggtaatgtattagtggatgatctgacccttaaggttgaatcaggatcaaatcttttgattacaggtagccatttgaactctctgcttgctggtcgtttctaattttactttttgtggttggttcaaccatgataattgatcttatttcattattctttcttttcatttgttgaaataatcattctcttgtgtatttgattgggggaagttgaaatgattcatgcattttggggcttaatttttattatgtgcattcatagtgtctagaaactagaaaggttttgcatattttttgtacatacagctttgtgcttgtatctacatggctggaagtataataaggtttgtgtactattgactccaagttcaataatgtaaatagaactttgtcttgtttcctttgtctcttttttattggcaagtgcctaggttaatgcatccagccaggttctgtgtcaaagacatgttatattcaagctatgttatttcaaatgagtgttttctgcaatttctgtaggtgccattgtaaattattgatgttggctggttggaaataaaaactgagtattcccttttagtgggataaggcttggtgcttgttgttcatgtaccggttgagttggaaagctgtccagagtaacgcatgaggattgtttttacccgatgtcatctataacccacttttacccttaacacattctcctggcaattcacctcacccactggcgtgtggttagtaatgactattgatcattactagttgctgaattttctaacagttattccttaggttattctagttagtttaggattgcattaatttttaatttatcaatcaaacaagacaatgtaactggtttaataactgttatttgccatgttgatcattaactggtttaataaggtgactgctttcataagtgttgcttatttttagcaaaaggttttttgcattgataattaattttatgtgcaccaatcaaatacaattgaatgataataattgtaataaaattaattagtgaatttgtagtctagtgattgagattctgcccactgatgctacgcacagtgttaaaatctcacttcctttgatgcattttgtgggaatatcattgaaccagttctacctcttaagccttgttttgtttcacagtttgagcaatccatcagttctaatgtgtggactagcacatatccatgtgttcaagaaaatgtaaactaacaacaaaatagtaaaagtttcattgttcactcctggttggtcattataatcctgatgagcatgtgcatttgaaggggctggaaaattagataatttggaatttgattaagtaaaccaaaattgttatgatacttatctgtttagctttcatttgacaatctgaaaggactatgtttcacttgtataattggatttttaaaataagatttctaatggttgattgttttgacatgtaactcacaattattttgctgaaggtccaaatggcagtggaaagagctcgttattccgggttttaggaggtctttggcccttggtatctggacatattgtgaaacctggagttggatctgatcttaataaggaaatcttttatgtgccacaaagaccatatactgctgtaggaacacttcgtgatcagttaatttaccctcttactgctgatcaagaggttgagccacttacagatagcaggatggtggagctattgaaaaatgtgaaactcacatctaatcctccttctatctcagtgccacattaatgtttagtgtttgatgattatatgttattttaaccattattattcatctgaattgcttgtacatgtattgaaggttgatctagagtatctattggatcggtacccgtctgaaacagaggtaaactggggtgatgaactttcgttgggcgagcaacaacgattgggcatggccagacttttttaccataaacctaaatttgccattcttgatgagtgcacaagtgctgtcactactgatatggaagaacgtttttgtgctaatgttctggctatgggaacatcatgtattaccatatcacatcgtccagcattagttgcattccatgatgtggttttgtctttagatggtgagggaggatggagtgttcatcatagaaggttggaactttactgtgctgcttattattgttttactatgaagctgtaattaaatataagattcaaattttgaactccagtgaggactcgtctactgaattggggaatgatacaatgaaggctttggagacaaaaagacagagtgatgccaaggcagttcaacgagcatttgctatgaataaaaaggtttagatattgtgattctggtgtttttggtttcttcacggttcattatcttatattgatgatgaaagcttccctatttgtttttttctttgcctaggattctgcattctcaaattcaaaggcacaatcggatatttcagaagtgataatagcatcatctccatctataaagcgtaatatttcaccatctgctgtcccccaacttcatgttaatacaagggcattgccgatgagagtagctgccatgtgcaaagtattggtaagtatcttgaatagatatgctccagtaagatttttactttatattgttttagtgagtcaacaacttttccatcatattgaattattgattaattctatatgtttttgagtacattatttatgaaaatcttaggtgttgttattttctgtggttaattataaatttataagtctaaatatttcttcctagatcttttctgtcaatttaatttattatagttctaaatccctgcaacctgcagttctagtatacttctgattgatagtgattagtgacattgttatgtaggttggcttacttgcagttttgtttttagatttttgttggttgcaaagttggtgcaattataattctctcaaactatatgaccttgctagtaaagttatgcaaaatcaggatgtccgatcaaccaattcagtttttaggtttgactaacagtggtaatgagtttattgaatctgaggttatcttaagatcagggtcacttgctaaaattgaatgctcttttagtttcaggactgtgatggtggagcctgctggagaggctaggaagatttaaactaggaaccaactagggctttgaaacaaagaaatataattatttttctggataacaacatatctgggaaagttgttaagaagtagcttcaataaaaaggggggatgataaactttttaattcacaaagatagaaactttattccatttaatagcatgggggcctagacatctttgacagtttgacttagcttattgaaaaattattacaaagaccaacacttccaaaagctttttaagctgtttggtggaggtctatataggtttatcatctacactgactagaacccccccccccccccccggaaaaaaaaaactcatgtgagggcttgaagcttgaataatacccaggcctacttttatgttatgcttaaatttaatttaatccttcaaaatgggggtgacaattactaaactcttgatcacttggttatttttggaagatattagggtgatgaagttattagtcttattgttaatggggttggccttctgtttgtaacactagtacttaactggattatcagtataaatgaaagtatagggtttgggtattgcaatttcttactataatacattgttagctgctattctgttttccttttccctgtctaaaccctgaagcagctaaaatggctttgatattatatcataggctaactctcccaaaatcttgagctgtttggtgtaggctcacaaatggtttatatttctatcaaattacaatagcgcctatttaagaagttaatatgaataagatttctttacacattatgcttaaatttcagtggtgcatctgcagtcaagtgtctagtgcggtgaaacaaatgaaactctggtcatttgttttatacatatgaatcgaatgcagttatcaaggtgtttacaataactcacatacactgctcaaccaatttagctagaccccctgggccctgggtaactctatggtcatttgtgttatctcattgacgacttactatgaaaaggatgttggttagtacatcttttatgcatttcagtgatgcgtctgcagttaagtgtctaatgcggtgaaacaaatgaaactatgcagtcatttgtgcactatctccttgatgacttgctatgagccaacatcctttttaaaggatgtgttgtgcacattagttaatccataaatacgatagatctcaggtgcatttttttaatgtgtactgcatgctttcaggtgcccaccatatttgataaacaaggagcacgactagttgctgttgcttttcttgttgtttcaagaacatgggtctcagatcgtattgcatcactgaatggtattgtcctatctttgacttttcattattaagagagatcatatttataacattctagggtatttatgctctcaggtactactgtgaagcttgttttggagcaggataaagcttcctttattcgattaattggtataagtgttcttcaaagtgctgcatcttctttcattgcaccttctataaggtaatttgggattcacttgtgtctaaattgttccttccatgaatgaatattttttgtgggggtttgaaattaggtatttgatcttcagtatatgactggaatggatatctcaatacttgttcacattgacatattaccatttaccattcaatttcttgcgcaaagaatcaagccatgattccacaataaatacatgaatttcttcaataaattgatcttagatgcttatgaaatgtttctctattattaggctgagcctaaatcttggtaatctgcttattgttcatttattgatatttgtacatgacaactgctgtctttcaatgtaatgtttgatttgaaagacaagaacttgaaaagaaaagaactgaaaaaaaatattactaggtgtgttttacaatacaagcacaaatccctatttataggctaaatttattaaacaaaataaagaaattaaacatatcaagggaaagaggtattagactaagaaagttgcagatgaaaaactgtgttctcctgtggagaattctgcattaaatagtgctcatacaatttgattctacatctgtgtattaaataaccaatctgcaataaatgctatcctacagctgggataactaattaaggagataattacaactgtataagcatgtaagatctgctattttgaatggccaataagaacaaatattctgcaatttgtgccaattaataactaatattctgctaatcaattccattgacgtctcccctcaaattgatgttggtaagtctaaaagcatcaatttgctaactaggaaattatggtgctaatgtgtcaaggattttgtgagaatgtcagcgagttgaatagatgtagaaacatgaggcaaggtgataactcgattgtcatatgcctcccagattgagtgacaatcaacctctatgtgcttcgttttttcatggtaaacatgatttgtggcaatgtgaatgacacttgtattgtcaacatgtagtggagttggttttgcttgtgaaaaaccaagctctaaaaggagaccacatagccaaataatctcaaagcatgcagtagacatgttgcggtattatgcttcagtggatgatttggagactgtgtcttgtttcttgcatttccaagagattggagtttcccctaagagcatacaccagtcagtagtggatttccggacatccagcccaatcagaaccagtctatgcttgaagttgtgttgatgcaccagtagggaagaaaaaaccacggttggaagtaccaagtagatccttaataataaggtgtactgctgaaagatgcaaacgccaagaaaattgcatgaatttgctaactatgtggacaacaaatgagatgtctggtaatagttgggtaaataagacttccaaccaacttactatagaaagttgggtcttgtagaaggtcatcttcgtctcgtcgcaatttcagattaatttccattggagtatcaggagcagaattagtgagaccaactaattgaatagatcttgaatatatttgtgctgattgacaaaaatgcctttctgttgaaagtgtacttcatatcaaaaggctgatttacctttgatttatgaattggaaatggtagtattttactttcctaagtttgttaaagttgcaatcaaattgaacaacactaaggaaattttattatcaagaacactagatttcagtaagccatgaagtacacaagagtttggatgaccaaggcgcttatgccatatttgaaaattaacaatagctgaattacaagaaacaaaaggcggaaaagaacatcgagactgagagaaataaagaggaaaaagacgttcgactttacgccccttcgcgatcatcttccctaattgttgatcctgcacaagacaaccagattttgagaatgcaacttcgctatcattgtcaactagttgatcaacaaaaataagataactagtgagaccaggggaaacaaaacagttggttaaagaggaggaaatgtcaccaatagctgtgataggtagattgtttccatcagcagtatgaatttgaaggttaccgtaatatcttgtgacatttttaagggattcaacactgttggtcatgtgattggatgcaccagagtcaaaataccacagagtacaagaagaaaaaggtttacctgaaagtcctaaagtagaaaatgcaaaaattatcatttgttggaccatttcaggggtcattggttgcgcagaggcaaaagagcattttgattcgcagaaggaccagctgcagcagtaaaggctgtttcagttttccttggtgggcttatggggtattctttaatgatatggccatcttttttgcagtaattgcaaaacattttaggacagtgtgaagcaaaatgtccaagttctttgcaatagaagcattggacaacactcaggtctcgacgtttaagttttccttgtgcagcatatgcaactggaaaagagccagatttttatgttccatggatgcttgagttaggagacgttgttcttcacgaagaagctcattgaggcatgtatccaaggatgggacaggagctctattcatgagattggatcgaatactctcaaagtcaaatcacaatttcataagaagttgatctctttttgtagtctcatgaacttgttgcactgcaatttgaccttcatttgacaaattttcatagacaatgtcagtgtattcaatccaacaattcatgaactaagataaaattcagaaattgagagactatcctgctgaaatatgacaatttcttgttctagctggaaccttctagcagtattattctggctataaatcttcttgagataggcccatcacttggctgcagtgttgaatggtcgaagattgagaacaatatgatgatcaacagagcctatgatccatgccatgaattctggctataaatcttcttgagataggcccatatcttggctacagtgttgaatggtagaagattgagaacaatatgaggttcaacagagcctatgatccatgccatgacttaggcgtccttgacttcccatgcatcatattcgttcggctggttttctttgttagaagcagaactggtgccgtcaacatgaccccaaagattgttaactttgacaaatatttggaactggaatgcccaggcagaatggttcttgccattaaggcgaatgaataagcatcatacttgtcattagacataaggctaaggaaaaaaaaggtaatcacaagagagaaatcacaaaaggaacaaggagcaagaactggatagtcttgcaaaaccaagaggttaggaattttggacagaactatgatatgatcgcaacctagactgataccatattagactaagaaatttgcagatgataaactgtgtgttctctcatgttgagaattctgcattaaatagtgtttatacaatttgatttctacatctgtgcattaaatagccaatcttcaataaatgctatcctacaattgggataactaattaaggagataattacagctgtataatcatgtaagatttgctgtttttgaatggcccacaaatttgtgccaataacaacaaatattctgcaatttgtgccaattaataactaatatcctgctaatcaattccattgacaagagggaaataggaaaaaaattatctgaataattgcaaatatattctaaatatataaaaggagattttatcctaaattagtgcctatttacaatggcttgtgatgtagttcaactacgcccttttgttgagtttacatcccattgattctatattctattattcataaattattgattgcacttaaaatatgaaaaatattggataatttgtagatagttcaaagcattgaaactgggaaaaagtttgaataggttgacctcacaagagtctttgaaaagtaaatttaaaaattaaaatgttgtcttgttctacagacacttgactgcgaggctagcccttggggggcagattcgtttgacacaacatctactcaagaactacttaagaaacaatgcattctacaaggtaaactattcattcattcctcagcttcacttctttaatttttttcatactgtaaacttgtttttgtgtccataactccatacctatgcttgaataattactacttcctgatgaaccacaatcacatattgttttatttttatatgttgaaccttttattgaaataattttgtatctcagtcttattgatatcattactttctactattgccccttcaaatttaactcagttttcaattttgttccttgacctcttcatagttccagtgtccccaactattgagttaaataacaaaatttaccttcacatacatttatgtgaagttggcaatttttaggattgatggtattagatttaaatttaaccacaaatcattttctcgtaaaatgtggaaaaattaaaattaattaactcagtaatttgacactccatagggatgttatcccaggaaccttactgatgccacagaccaaatttcccatgtcaatagtttgagaacgtcgactaggtttggatttcactaacaaaaaatgtgatgttattattatgaataataaatatattattcaccttgcttttaagctatttaggcagatgccggatgactggggcttggttctgaattcacattacatacatttctttgtaggtcttccacatggcaagcaaaaatgttgatgctgatcagaggataactcatgacttggagaagttaacaacagacttgtcaggactggtcactggaatggtaaagccatctgtggatattttgtggtgagtaattcatttgcaaaatagagttattatgttactatggtgtattttacttgtacatggtcaattaacatattgatgcaaaatagagttattatgctctttttttttttttttacttactgagtactttcgttattctaaaggttcacttggagaatgaagctgttaacaggtcggaggggagttgccatactctatgcttacatgttactcggtttgggatttctaagaactgttactccagattttggtgatttgattagtcgagaacaacaacttgaaggaacatttaggtaaactcattctactgtcagctaacaatccaggtactaatcaaatagttctgttgaaattattctgatcggtttctctttatgcttttctaggttcatgcatgaaagactttgtactcatgctgaatctgttgctttctttggaggtggtgctcgagaaaaagctgtgagcatcctaactctgcaatatttaatgtattttctttaagtgtttgcttgtttgaggacatgaaaggttgaaatgaaacctgatgcttgtcataataaaaatgtgggatgactgaaactagagtgccaattcaccattcaaattttggacactcctgttacttgaaagtgagttgaaagaagttttatccttttggaagcaataaagggcagttgggttataactatgagttgagaggttgtttctgcaattagaaccttgactgtctggtcataaagcagcaactgtaccattatgatgggggttcatcatcaacctttaccaagcaataaagagtaaaactcagcctccatccccgtgttcagtcctctcataactttccactttctcattttccacctccttgattaagcataccctaaattttatacatgttatgtgtttgatcaaattttatataatgtagggctctaatatggggaagtgtgaagtgggtctcagtttgacaggaaaagttcaaaaaatttatttttctttttagttcctatttatgttctgataatggttggatgactctacttttaataacaggagcagattaaaactatggttatcgtcaatctctaaattaaactctcttaatgttgagcagatggtcgagtctagattcagggaacttctcagccactccgagtaccttttaaaaaagaagtggctgtttggcatcctggatgattttatcacaaagcaacttccacataatgtgacttggggcttgagcttaatatatgccatggaacacaagggagaccgtgcatcagtaactactcagggtaagatatttgcattgaatcatttactctatatttctcttgttgctctcctctctcacagacaacactatactaataggtgagctagcacatgcactgaggtttttggcatctgttgtttctcaaagctttttagctttcggtgatattcttgaattgcatagaaagtttgtagaactctctggtggaattaatcggatttttgaacttgaagaacttcttgatgcggcacaatctggtatttaatccttctttagttttataatcaatcatatcaatcaatatcttgctgtttgtatggcagtaaatctctttaatagccatcaaattatgtgctaatatgaccttctaccgtacagagaatttcacgagtgttagtgctatatctccagtgagggatgttcattccagtgatgtcatttccttctcaaaagttgatatcataaccccttctcaaaagatgttggcaagggagttaatatttgacattaagcatgggggaagcctacttgttactggttggtatagtcattattttatttgttttgtcccttcagaagagggaattccaatgtgatgtaaattttggtcttacatgtatcttctttttaaaaggtccaaatggaagtggaaaaagttccattttcagagttcttagaggactatggccaattgccagtggaagactatctagaccatctgaagttgtggatgaagaggatggatatggttgtggcatcttctatgttcctcaacggccatatacatgtttgggaaccctaagggatcaaattatatatcccctttcctgtgaggaagcagaggttaaagtactgaagatgtatggaaaaggtaaatatcttgggtgggagaaataaggcaggccttagaaatgccattatgggtaaaaatgaaagtttctgactataaattaacataagcaagtagcaagttggtaaatctgctttgattctctatttaattttggattattaccatggttaaagtgagtaatttgaagtctagatgcaataaagtactctttctagcactatgttaatacaaaaatgaaatatccccattagattttttggggggtggggggggggggggggggggcgggggtcaacaaggctttatctgatatttacttaggggattggaacaaaaccttatttttaactctacagcttactgtttttagtatttgagtcaactaaagtttataacaatgctattgtgttacttttcattaatcaccactagctgagaataagttttcttctgagctattctaaggttgtggcaattcaatagaatgatgttcatgctgatattgttgaaaatttctcttttgctaacattttatttggggtttagggtaaggcgttcattgttacttactttttatttggggaaaattattctggtcagttttcttttacagatcaataacaatttcttgttctcttctccaactgttttaaagtgtgcattttatttatttgcttttccattttagctctgatgattataacttgctaattcaggtgaaaagcatgctgacacccgaaatttgttagacacacgattaaaagttatcctagagagtgttcggttgaattatcttctagaaagggtgggaagcaactgggatgcaaatttaaaatgggaagacattctttctcttggagaacagcaaagattgggcatggtatgtaaatataatctcttgaaattttagacagttttttaaatttcttaaatatttttgttttatacagcatgccccttagaaagtcttcaattccttaaagaaagacatctattataatttaaaatattctcttttatggtttttaatgttgctcactctgttctgtaaggcacgcttgttctttcataagcccaaatttggtatccttgacgagtgcaccaagtatgtatgatttgcctttgtcttttccttttcagagaaattgttgcttgttgttattgttaatcttgtttcatatcctaaaaaaaataatgttggcagtgcaactagtgttgatgttgaagaacacctatacgggcttgcaaaagatatgggaatcacggttgttacttcctcacaagtaagttgattatacaagtatattggaaaaaaaaaaaaatactgtcatggtaaatttagtgaattaagagtagttcactaattagttgttttgatgttgcctcatttccttcctagtgtacacttattttatttctttagctctagataaaccagttatagcttgtctaacattaaacctgcatgttagccataataatgtgtgatcaaactaaatttctctgctgctgcccccagcgtcctgctttaataccatttcattccatggaactgcggctgattgatggtgaaggtaattggaagcttcgattgatcaagcagtgagtttactaaaacagtgttgctgcatggactcagtataccatttgagatgttttcgagtcgagtctatcacaagctggctgtttccgagcataaattaggtttgccaacaaaggtcaatcctatatgcttttattttgagtttccatattctcctagattcaatgtttactaggggactaacaaacaaacagctgaaacagccaaaattgttgataataagttcttcgagcacacaaccattgcataatctctgcagtgtataggtggtgatcaatcatgtatagtttcccccctttcttcttaggtagttgatattggttcatatgttgtagccattggatgtaatgattgatatttaaattgtttaatcaataaaacagccggaaagaagggttcgtcgagctaatttgttgccttcaaaaactcccatgctgttgtgtaagattttttcttatgttcttttttcttcttgtgccacctgaactgctttcatctcatcccttggcgttgccttcattgttcctatgtggccatgttatgaatcatgatgaaatgtttagtactttgataagttttttcgttatatttaattatatacttgatggtttgtttaacatgtaatttttttattaaaaaaaagaagcaaaagaaaaacggaacaatctatttacttattagattaaattgatattgaatttaaactgatttacattgaataccaatatattttacttaagaggggatacaatattgttataattcacattaattctaacaagcttctcaaacctccatacatgaaggaaaagggggatcgaaggttatttttcttatatttaggctctttctttgttttaatctttcgaaatccaccctgaactattgcatgtattaatgtgagttatcaatatatatatatatatatatggtggaacaccgaaatgcaacaacttttgccaactttggcgtccacatcccttgaattgtttaacaaagactctatcaatttatgagggtatctatctgttatctataataactcacgactctaataatttctgtcttagcacttagatctaccaactagaaattgaaaaaacctttttcttccgttattaacaattaattaataaacgaaattgattagtcgatagacaattaaaagtagaagggtcattgccgttattgttgtaggcgtatccaaaccacaaatgttaattagggtgatcactgatgaattgcaacacgttatacatggctcttcttcataagttcatgttgatggagggagctatggccacaatttttttgaatacttcgtgtgtaagtttgaaaatcgcacatacaccactttcaaataccaaagtactgtattaccacctgaaatgttttagataagatcatttgtcattaataaatttgtgagtctttgttacacagttgtgttaaacactcaagaaaaatttcataaagtctaacaaaaacgtaaccttaaattggggaaaatgattctctaagatagtttttcttttccccaaggataccttttttcgcaaaatttgttcccgtataaaatctcaacttcttttgtaagtttaagtacgatataattgcatttttttttcttttcaaattgtacatgtgatttttcttggttaaattattttgcagtcctttataattttgataatattttaaataagtttttataattttttaacaagatctttatggatattaaggttttaggttaagatatgacttcaaatttatttttgagtcttaaatttaacaccacactttaatctaaaaccttagagcttagatttatgaatcttattttcatttatagagcgttcaatcttcacattcttatccgcttatatttcaataaatataaatgtcacaaaaacaaaattaccaaacacaaattaaagtacctttaaagtcaacttctatttacttaaactaattgtttttttttgttctctcattgtttgaactaaaagttacttgagtataactttccttaagatgaaataagaagccacaaaaaatggaagtaaaaaatcgtcatgaagatgttgtggcgttttgcagccgtgactgaaagagttagaaggagataagtagtttttacttgcccaaaaacgataatgttaaattgctagaagcagataattaagaaacacggaataattaattgttagctacgtttataaacaaaactttcggaattctggaaagagaaattgccgtaagtgttgagaggggaacgtctaagctacttatttagggatataccattacccaccaattattaagtgttgataaagtggtcaaatatcacaattaacagctgatcgattattaatctctctctccttaaataacgttgtcttaattaagcataattctgatagtggatctataattatattttgaaaatagaaatagttaaattgtcatccttttctaggctaagatggaaagagatataaaaaattgaagataaaatatatctttagtccctcaaaatattttgaaatgagtttaataattatacattgaaaatataaataattttatattgttattcaattataaataataattgatataattttttagatagttgtgttttggtgacctgttggttatgagtttgcattcggaaacagtctctttgcatatgcaagggtaagattgagtacaatatctctcctccttacctgcacatagcgtggagcctccggataatgggattacgtggttttcttttttactataaaaattaataaattttacaatttgttaaggaaacaaatatattttacatgtaacaatcttacttacatttgataaaattattatagattaaaaaaaatattttttaacatttaaactataataatgtaatgttaactttttttactaacatttaaaatcatatttaatatgacttagacttattagaatcagtcttgacacaagtgtcacatcattaagttttgattatttaaaaattattgacttagcatttatgttatttccttgactgctacctttttatatgtaccaaaagttatttaatcttaaggtttgatatcagaaccaaaacatccttattttatatgtaccaaaaggttatttaatcttaaaacaaagaaaagttaattatcatcatcatttcatcacattaattctctgctcctctcttttttatctttctcggcatgatgttccttaactaaaaaaaaaaagttaattatcatcatattgtcatatgatatgcacaacaactctcgccccacctaatgtcttcatatgttgtatccattcattttaattcatgcaaatttctatcccccctcccctcctcttacttttattgttaacaaattttccattcaagcatagcctgaagtctatttgtctccctctactatgacgtcattttcaatttgcttgccataaatcataatcgaatgttttcagctgctcagccatgagatttcgttacagctcgacagtgggtggtcgccaaaatcttttgtgtgttgcaaagaagccatgtttcaagaagtatcccattgaaaaaaaaggaaaaggaagggagtgaaaaatttgtgtgatacaatgatgataataattaatttttttaattttaggtttaaataactttttgatacttctaaaatagggatgttttggtatctaatttttgtttgtactttaacatttttttttaaaaaaaggtaccttaatggatgatttgaccgataagatttaaatggcttgtatttgatgcgaacttttctttaaccacaccatcaattaacaaaaattcattaataacaactacctatgtcaaaaataacaataagagcttaggtactaaaatcaaaataaataattcttttatgttgtttacatatcatcgaccaacaaaatcttcaatattaatggaaatcaaaaacccatatatttttaaaatatgagtatgttatgtaccaactaaaccaccatttgtcaataaaaatactcctactttgaagatactaaaaaattatttaagaagtaaaaatattttcacttataactactactcaaagtagttatatataagggagtggaatgacacacgttgagcatgtagtgcgagtatccatttctaggtgccatcataataactgataactcaaacctctcgagagtttgtcataatattattcgtaaattgtaggtgggggtggcatagttgcagttggaaatcgaaagaagagaaaagaatttggatagtgattatttgggttcgttatcgttgaaacgttttttcaaatctggtgtggtgaataacatcacccctcacaaactaaacaaaatgcagagccagagaaccacgccgctaaggaaccctcacacctccacctccgatctcctaacgtggtccgaacaacctccgccggagtcctccgcctccggctaccgctctcgccaggttactacttctatttactgtctctgttttatattttatttaagcatcggtttagttggttcaattgaatctctcgtgaagatatataatgagcttgttcctcgaatcgcttatctattcacagccttctgataaaatcggtgaggttctccgcggaagcaagctcaccgcggaagaagcacagagtctaacaaaaaagtaatgctatcatcttttcttttcaattctatcgcagtgttggatctgttattgtttgttttttttccaactttttaattgtttcgttctgtgatccgattcagcgtttgtttctttatcttgtaaaccctatgcggtttttcaacttctagtttgtgtcgacttttttccctctatttattattgggaacgttttgagaagccaatcattggcatcctgcattcagttgttgaaacttgaaactctaagaattgcgttatgatgaacaatcaacacgaaattattttttggaaaattgctaattggtacgaatttgtgtatacagctgatcattcatgatgctgtacaaaaaaaaaataaataaaaactgatctcatgatttcggctaattaccaaaattcttttgtttcttaatttacatttgaaccaattatattaaaacatcttttgtaaaaaaaaaaatacatcaatttttttttacaaataaaatgttttaatattaataatgttataatattttcataatattatacaagataattcataatattttcattctaattaaattattgctttaaaattcatatttactatttaaagtgtttttttatttagctgtcagagtaaaaaacttcaacgtgataaaaattaaactgaaataacgaatttatactatagtatgtttgctactagttaagttaaaaagtgcatgctgttatataatcttgttgtcaaacatatcttttcatgtgttttactgttaaaggattaattttaatatgtttattttcggttattagccgtcatggctagttgtttctgttattttgctgttctgttgtgattgtaactaccttgctttatttttcttcttatagctttgtggcattttatataaataggcttccagcccaatgaatgaagtcaaattccaccttgtgcatccaatcatttttttttttcgtttttctcttctgacatggtctcagagtaatcctgtcccttcttcttgttattttctttttcttcttcttgatactcaggaaaccctgctcaggatataaattgaaagagatgactggaagtggtatattttcgggtaattctgaagataccacatcagaagaaaattctgcaaattcaaaaaacagaacaagcatacgcgtatataaggtatgctagatggttaccttattccaacttccaaggcaatttgaggtttgaccatatgaatgcgagtgtttcttaaataccaacttcattgtgataatagtattcttgttttatttccctgcaattgcatctcagcaagcaatgaatggaatcagtcagatatcattcagcactgaaggaaacatttctcctaaaaaaccaacctctcttcccgagatagcaaagcaacgtgaacttggtggaacatatcaaagcgaaacagtcacgaagatcaacaagcaaacgtcaagtgccaagaccaaggagctcagcggaagtgatatatttgcccctccttctgaaattgtgcctcgttcattggctgctgcacacactttggaatcaaaagaaagtaaagacaccagaatatctgttccacaaaaattgagcacatctgcgcaagtttctaatgtaagtatcttcttggcatgaagaccaatcacgagtcatataaatcatttatattggataaatgtctacagaaatttttaattgctctaatcctgtcttatggctattcatagtgatgaactttttacctttggtggtgcaaaaatgtagcctaatggtttcctgaaaggcaaaatttaaatgcagaacaatttgtctaattttatgtagttataacccaagggttgtaatagaaatacggttgcagctctggaagaataccatttatttggggatgttaaattttctatcattaatgtttcttccctcgccaagatatgagcctgttatcttgagttagagccaaactgcacattcattatgttgaagaggtccatcagtttgtctacatgtttttgtagtttccgtgtcagatttcttcttaaatttcatttttctccttttagaattttttgttgaaacaaaagacatgtttttcttaggttttcaataatgaaacattaatttttcctctaaattaagctgtaaattcatccatttctaatccatgtgcttccccctttagctcatgtgccttctccctcctctttatgattacattttgaccctagttttgttattgttgcagcgagccgatggccaaagtaatttctcattcagtgaacaaccagttaagatattgaggaaaaaaatgcatgaccagaagtttacagagatgacaggtaataatattttcaagggagatgttcctgcaggatcaccggaaaagccttcgagcagagctaaacttagagaaatggctgggagtgacatatttgctgatggaaaggcagagagcagagaccatatactaagtgcccgcagaccccccggtggagggagtgacatatttgctgatggaaaggcagaaagcagagaccatatactaggtgcccgcagaccccccggtggagggagtgacatatttgctgatggaaaggcggagagcagcgaccatatactaggtgccctcagaaaccccggtggagggagttacatatttgctgatggaaaggcagagagcagagaccatgtactaggtgcccgcagacccctgggtggagggagtgacatatttgctgatggaaaggcagagagcagagaccatatactaggtgcccgcagacccccaggtggagggagtgacatatttgctgatggaaaggcagagagcagagaccatatactaggtgcccgcagaccccccggtggagggagtgacatatttgccgatggaacggcagagagcagagaccacatactaggtgcccgcagaccccccggtggagggagtgacatatttgctgatggaaaggcagagagcagagaccatatactaggtgcccacagacctcccggtggagggagtgacatatttgctgatggaaaggcagaaagcagagaccatatactactaggtgcccgcagatcccccggtggaggaagcagcattgcgctcgtttaaatttgatcatctaaattcgtccaattaactgtgtactttctataaattcctctgaagttccgtgttttgactggaaggatcagtgtgttggattgtcaacatcgtatatttatggtataacccccgacacagaataatttggtttgccataatgggtgcaaatgtttattattcatttatgttgagatttttttggccatgattggataaataaaattgttgagatttttttgtaataagaaattatttactctatctggtttatgctttttatgcgataattgttgagaagtatatttgctgatattgttgagaagttaacaattatagttgcctttaagctatctagactgactttttgtgaaatgtgatggtatgctggtaggaataattgtgactttataaaagtagaaaaaatacgcagcaaatattctatgatttaatagtaataaagaggtgaagcgctgtgtcttgaattttcgacattcaaaacattattctaaaacagcagggatggtttatactttatccccctcataagcagctttaccggcaagccactgaattcctctgtccagagatccacagcaacatcacattcatgataataggaaaagcaaatagcctaagcatcaattccatgagacaactgaagagagaaagaaagaacacttaatcctcatgtccaaccagtgcaaggagaatgctctgatagtctccagaagtgtcattggctattgcgcggtccagaggaatgctatttcttctttggtattcctcagcaattcgctgcaaatcaacctcagctctggtggtcaccactctagtaagggccccttcatcagttcccagcttgtttatagccatcctcaagacttttgcaaaatatttctcagggtaagtcaagcacttaatggctgccctcaataattgcagatagtcatcttttggatcggttttcagatcctgcagccataagatgaattgtcagttcaactaccagtcactgattaatctaaaatcactaaatcacaatttctatcttgtcttcatatttatttttttgttttgaagtaagcccagaatataatcctttaaaatgtagcaattgattcatctaaaacaagattatcagtggaaatcacgtttcttaaagtgaacaaaacatggtcataaattcagcactatatcagcataagtgctgcagtaggtactcaaacaaaaagcagatgttaggctaaaatcatagaaatgagtcataaacagtcaaaaggtctataccttgtttatggcattcccgaactcattgttgtactgattcagtgttgctgttaactgtgctttactccttgttgacaaaatcctgatcagctcctcatcattgtaggccttctctgcaatcttctcgtgaagcagtttagcctcagattttgccaatgtcatgttcacctcatccccctcataacggaatatgctcataagaggaactaatagctgttattgacgtatttcatcagaaaatagggggaaaaatgtgtgaaaaaaattgccagatcaaatgcatgattggaatcgcttctttttttttttttttctttttttttaaagttctctcaggaacctaaaaaaataatttaactaaccatgcatctagacatagcaaaataatataaaaaaaatgttaatattaataagcttttaaatctagcaattcaaatgacatcaagcaaaggttctcttgaatataaatctaggacacacttctaaacaaaggttctcttttaagttgaaaaggtttatatacattggaaaattttgatcgaagaagaaatgacatcaagcagaggcatcagcctttgaatattatgtaagaatatgcaacttttctttatcaaggtgtaagcaagtacattagaaagttaaggttttaccttgcggatgtcccctttagtatgataggcaacgtcttcttcaagggactttttgaaacgggcttgatatgcttgctttgccttaaggagatcaagtgaagatctagtggaagcaatttccaaaatgacccaattgtttgaagtcaacatcttagtggcttcattagctaaaaaggcatcacgctcagcaggatccaatgtccaaactaacacagcccgcttttatattcaaaacattaaacattagataagaaactaactttataactgcaactatccgtttcctttaatcaaggttatccgtatagaacacagaaatggagtattatcaaaattgaaaattcaataactgatagtgtcattgaaaattctaacttctgaaaactgaaatgggcgtcaaattgagatttacataaagaagccagatattaaaagatttaaactgacctcaaagtcacttgaaagttctttgtctaaatctttaagaagatcttctccatgagttgcactataagcttcacgaatcaacttacgctgagctgcatttctatgacccaggattgatattatcaatccttcattcgttccccaccctgcaaagatatgtcacagtgacaaaattggatgaacaatcaaagcaactcttgcaatgagagaataaaaaatggctcatgccatgataaaacaaaggaacaaagtaaattcccttatttgaaaacttctgaattattcaaagatccaatttcactatgtattaattttctgtaatagttatctatatcttcacttgtttgagcacttctgaacacacacatactaatattaactattagtattactgaattaacgctgggccaaacatcgtttgcatttagttcttaaaaacacaagatctacatactaatttagtttattttatttcttttcttttcattttttttctcctgtgagtacatatgggaagtttatccaaccaaaatgtaagaatgaaacttaaattatatatatatatatatatatatatatatatatatatatatataaagaaaagaaaccaaatctcaacgataatgattccgtcagtcgaattttcaacgtgtctacgcagttagcaaattgtaaccgttggatgaagataaaaacaatcaaaaggcttgtattcgatcttgtagattgaacttaggaggcatttggtaagagacacattttttgtttatggggaatcataggttggtctctcatgtttgatatgtatttttaaaagattatattcatgaaaaatgatgttttctgaaatgttttttattattttcttactaaaattttcttatagcagagatgtgaattttattttttgagtttaatttttcttttattattataaaaaatatcatattattttttattaaattatataatataataaataaataaaataatcagtaaaaatttatttgtaactctttgattcctaaaaaatttatctaaagattttcaattgtgaaccaaacaaattttattctttctcctaaatgtaaaaaaaattctgccctaccaaaagttatcataaagcacttattgtaggcatgagttgtctgatattcatccaacggtctcagtttagtaactgaatgaacgtatgaaaagtatgactgcatcgaatgcggttccagcactcatcaagcagaaataactaacaatgactgcataaaccaaacacaacaatctattccaggatctctaagtaagagttgatatataataaaaccccatcagatcatggacacaccaaaagacttaaatccaaacgagatagatcgagaaaatgataagcagatcgatgatctaacaacaaaataaaagccaacaaattcaaatcaaagaaatgaatgagtggtggtaaggtaaccttgaaaagcttttcgcaattgctcactgtcttccactggggaaggaagttgagcaggaaccttcaacgtcgccattttcgatcacgatctctgtgcgcaatgtgatgtgatgcagaaaattgaggagttgttgccagcttaaccatttatttatatacaaggaatggtacaaacctattatcgaccacaaaggaaaaaaaattaaaaagaaaattaactttaatcataactataattggctacctatgtatgataagacattgttgacttttgtaacaaaattaattattaataaatactcaaaggacaaaagttagataaattttcttaagtgttgtttatgctattaaacaattagaactgatctaaagaagaagaaaaaatagaactggagtttcactttgatagttttcctaacaaaggtttgcataaaaaaggttacacaaattatcaagatgaaatctaattctcattggataatagcaccaaagagagtggtttgtcaaaaaaaaattataagcaagtggtttgtcatttactattttttaaattcagttttattacattttttgtgtatttacataattaaaatgcatccagagtataatttttttatatagtcatccaattataaatcgttagtatgtatcataaatttattaactctcataataattaccctaagaattatttaaaagataatattttattatgaaattcattatttttaaaaaaacttggtagatttatattacacagtcacctgttatatttagaatatggttacagtgaaaataatttcagattatttgatattgtaatattgcataaagattaaattttatgcattaatttaatttatttctaattataacctttttccatggaattacgaaaaacgtgacataggtttcaaataaataaaacgtgaaattgggttcaaacgaataaaacgtgacattggttgttccgggaatctatatgttcaaaattcaaacgacgtgttctaatttgcatacaaaaatgagtacgttactattttttcggtgtcttgatctccatgcacatggaacaggaccacatggaacaaaaataagtacgttactattacatctcatcgctaaaggaagttaggaattgtgattgtatgtttcaattgactttttgtttatggatttggaagttcatggaggagttagtaacttgtaaaattcttaattttgttggtcaaggaatgaactttcatggttataatcctcttcctcataaagtctctgcttttttgtgcaaaacataacttattcttagttgaaatagtctcaacctaatcttctaatttaggatacgtggcactggctgcaatttaccactgtcctttcatgttcttgcaacatttaaggtcatttgtaacttttagttaggatgatttagaggattgaattgtatagttgattgccaattatataagttttctttaggattttgttgttggaaatataagagtgctacttacaaattgttgagtaatgtgtggactaaaattggttattttgcatattggatgtttgaatgataagaaaatgtttggtctttattttaattttggggtgttagagctgaaaactttatggtaaccatacccgtttcacctggttttgtttgcctttccaatatgccaagcaaatatggtagtgcagttgcttcttctaataatggctgctaattattgcatcattttccaggctactcacatatgacaaggaaagaacgcaaaaaggttgaaaataggaatgttgtttgtcttggtgggaaggtgaggactattgttgatgttctattttgtttgccatgtgccaatgcaaatactagttcaagggtgctcaggaaacaatttttttgctgtttatcattttccaaaatgtagccccccaagaatcagatattaccttataagtgtggcacgcccaaatgatgaagaaacaaaaggagagggagcagaaaatgctccaaaagaggtaattaatttctatcattccccacttttatccccctggccctgttatttttctgtttgtatgttactgacattattcatatataaatttgtacctattacattgtggcttttagcgtttgattcttggacaatttgggggaaagcttggtggtagcagtaaaaaatctgctgggaagcacaagccagagaacaggggtctgaaattaagtgaaggtcattttagaaatggcacactcaatgtgaaaaaattcaacaccatcaagagatcgtgaaactggaaccaatatgtccaatacagggaaaggtggtatgaagaaaagtggtaaaaagggtgccagtaagaagcaccgttgagcatatccttgtgaacaacgtgttttaggaatattgagtcgtcattttttaatatgtatgagtatgacctttataaatctagtgtatgacctttgggtaagcttttgacaaagtaaaatggaatagaatataaaacaggataataatgtcttgtgttttctggtaattataaaactgaacaaggccttcaaccttgtgtcttgttttgcgtttttgtgcttatcaaaccgactaagacatttgacgtaatacaatggaatggtatatatattcctgtgttgtttgaagtgaagtatatatatatatatatatatatatatatatatatatatattaatgtcctatagttaaaaaatgattaaccttttgataaaataaatcttttgtcgttgagttgttttgagtttattaatctttttccacaatatttatcgtaatatagcttgcgattcaaataatgatagctttggtaagtagttctttgcaataaatttttaaattaccatacattttacttttactttacaaatagaagtaagtaataatttagtaaaaaatgtgtaaagcacgaaagcataaactgatgtttaattacgagaataaaaattaattaaaaacctgtaaaagactaaattgcatgaaaccatatttatatggattaataacatatttcacgcatatttgtaattgcaggtagcagtattgtctaacattaattcagcagaaaaaaaaagtctaacataggatacatcaattaataaatagataaaattcaaaataattcattattacattttgatcgaacataattccaagtactcctatccttccgttgttttttaattgtcagatttttaataaaaaattattcttatttatctgtcgttttcaaagtcaaagatagcattatttcttttttgtcaattataccattattccaattaattatttacatattttttttatataaattaaattataagtagttgaaaacttcaacaacaaaaaattaaatgcagtggaatacatacacgttctccagcttctccacttttccacaaatgacttattcccaacaaaagagaattaaagataatacatgctttgaatctaaatttaaaaatgaagaggggtaagatgcaagtatagagtaacaaaaatgggaaagatcttaatgtttactcaaatcaaaacttttggtggtaagcattttaagaataaaattatagagggaagtttagttcagtttcaaaagtgtcaattgaacaaaggaagagaaatgcttcaacagatatcaaaaggttggctgacagaagaaacattagcttacatctacgaaattggatgctttgtttcagaaaaaaaaaacgttagagataattaatgaaatcttgaccaataggaaattaggaatatgtgttagttatggagagagagagagagagaaataggagtatacaatagttatgggtattgagaaaaacgtggagtaagagaagggacttaataggaaaagtgtctacaattttattaagaaaagagtggagacggagtaattacatttgttgattacaatgaagatctccttaacgactattatataaaaatacagggagtaataaagaaaataagccatttatttttttaacatatcaaacttctaatagttacttgattctactattctaattacacggacacatgagttttgacaagaaatccttttccgtttgaatatcaatcttgcatcaacaaggaataataactttatatggcattggcagtgaaaactgaaaagtgagaaaaatgcaaggaaaaaaaaatcgaattcacttgggatctaacccagaatctctggttattggaaaaagctggctatcttaaaacacatagctttatatggatccctcctaccttgaagtgtgaccaaatgtaataacactacgactttatatatacacaataagtttgagaggctttccttagaagcactctttatggatttatatcaagcatttgaacatacacaagagtgtttgacacagttagcacaacagagttgcctctgaaaactaaataaatggaaactgaagtccatctagtatttgtattgcatcatttaattatttctctgacgtgtccaagacacatttggaccaatattattctaatttaattaccaagcacagaaaagtaattgaagggggaagaggaatgagggttcaacagatcatacaattataaaaacagataataatgtgcgtatacatagtgaaagatgatgatctctgtttttcgagctcaaattctaactgaacccaaaaagcaatgagaatattaatgttaaagcacaagtttatattccgtgcggtgatgaatatattaatcattaaatgtagaaacaattaaaaaccattttgaatgtgctacataactaatattaataatttgtaattttgcaaagtcaaggcttaaatattttttcttgtcacctacagtgagcctgatattttaagtaaaaagctacttaatcacaatttaaagataaaattgtaaaaatattttattaactctccattttcttctcttaatatatttttaacttttaaacaagcacgtagaaacttctctcatttttctctctgtccttccccttcattttccttaaatttctttcattcccttcccctcctaactctaaaaaaaagtctaaaaaaatgaaattcatggaaaacaccaatcagaacaatactgaatactgcaatcaaaattttaataaaagttgtttttgaagcaatttttgtaaaggattgtaatcaagacaatattctcctagaatttgaatcataagtgattaaagaatctgttagaatttaataccacataaacatatgtctcataatccaagaaaatcctagagtcctcactcttttttatttctctatatgtgttttctcctgatttaaccaatttactgttgatatgatacatgtttagaacaatacattgtttgatgtatttgaggactaattaccttttttattttattttttatatgaagactaattattactttttaagtacaactaattgaataagtcatggaatgatttttaaaataaaaaagctattacgcacctggctttattatgattttggttcttcaaattagggagtgttttttttttagtcttttaaataaaaaattattttttaatccctcaaatttaaaaaatattatttttaattcctactttcaaatgatagtttgaatctttcaatccctcaaattcaccatacaatttggtactacacttgatgtatattatttttttagaatcaatttaatatgattgaaattcataacaaattcgttacttgatgtataaaataaatatttttttagtataatgtgattgaaattcataacaaagaattttccgtaccaaatttactttgaacacaaattcataaaaaatatattttgttcaaattcataatgaagaatttgaacaaaatatatttaactcgttatttagtattgagaggatttgtaagaacgaaatgcaagtggatttataattacttttaaaataggatttggatccttcccatttcttttatcactaagcttttagcttttgaaaaaataaaagttattctctataaagtgtatcgtcttcattttattattttctaaacacttataaaaatggaagaaatggaaaaaaaaaaaacggagaggatcgatttcctttaaaataagctataggtgtaacaatatgcgggtctcgagtgattatgatgttgctagtgtcttgtttgtttgctagtttgtagcttctccctgtacaaaatgagccactgtccccccatcacccaaaaagaagggaaaatatttcagggatcagtcaaggcatacatgatgcaattgcacaaatgtgccagcaaatagaaagtgatgatgggaaaaacgaataggcatgccccattagtggatgcacgcacttttggtgtatatatcgatacatcatcaaatgcatgcgcaagcaccacttatatatagttttcaatatcatgccttgtctgcccaatttgacacacttcatgtggctgagaaaaaaagtcaagaagaataagaactcaattattattattttttgagaaaaaaccacttttgtttgaaaatacgctttaatttttttttttcataacaattcaagtaaaaaaaagaataaatatcaaattttatccctgaaaatataattcaatgacatatcaattactgaaagataaaaaaataaaatttaatctccaaatggataaaaatgatgacatattgatcttgtcattagtttttttggttggtctttatgtgtcaagtagaaactcaaatgtaattggaaatattaaatgaaatagtgacttaacaggaccaatttatcatcaaattatcgatggattgatttatcaatttttattatatattttttacaacatcaaccgatattattcactttaaaattaacggataatattatttttttttaattttactctcatcttccttatccatgtcgtcaaatacaacgacactataacatgaagaatattattttattagtgtcctgaaaataattgaaaactaaacatataactaattctcatctttacctacacgcttgttggtgatcccatggtgatgaagctcatggactccgcctccctgcagggtgagcatgagttctagaacgagctcttcgcatctcaactttggtccccatcgtcaatgtctactttaacccaaacaacgttgtttcccccttgtgtactgccatataagtgactatgagaaatgaacaatcatataaatgaatttgacaccacattttaacccaaaatcttaaaactcatgtttatgggtcttctcctcacatatataatgttcaacttttgcatttatattcgatgtggtgtaacaccctgattgaattacaccaaaatgaaagagatatagaggttgtgcaggtatgagactgtacaactaatgatgacttaaaataattaattgacactacctatatcaacaagatgcatatacttttcagtagtccatcaattaataacttcatggttgagcgtattttacttggaatagttattggataagtgactttctggaaagttttttggaacgcgtatgagtgaggacaaaacacgccaaaaaatcttgtgttggtttgtgttgtaagtcattaatcttggaagcaaacaaagttgatttttgaggtctcaaaaaggactacttatgaagatttatgaccaacaaaaatgttgagtgaaatgtcattgcgtgaagtgttgtaatgtaagagccaccaagatgtcgaaaatcagggacgttatatgtgagacttcacctcacacttgtactcaaataatttccccctcaagtgtaagtacttctcttctacatggtaacttttccctcaagcggaagtcatttttattcacaagtattttcatggtggccattagagcacacatgctttagatacttgcatcgtcgtttcacccacgggacacgctgcttggactcggcacgaggaagactttcgatataagggatccctaggccaaggatccatcgtcgccatcttactcatccaagccaattaccaagttgaaccatcgactttgataccaattgttatgcaattgaggggtaaacaccggagagatttacaccaatgagtcatgaacaaccatgtaagtgaacttgataccacactttaccccaaaacttttaaggttttgagttataagttttatcatcacttatatggtgttcaacctataaagcgtatgaaggtttgtggtggatgcaaagaataaagaaggaggggagaaatgagaaagatagaacgagaaagagaaaaaaaaataaagaaaaaatttgagccatgaattaaaaaaaaattataatggtgattttttccataatatgttagtatgtctggaatctgatttctcacttgcaaatgacaaattagttcattaacaatttaatgataaattgattgagtcagatctcatgagacatttattttcatgacaattaaatttcaagttgccatgtaagcatcaacattaacacataatggaataaactaacaataggattgatatgtaattatttttgtatatttaaggactaatttttatttttattctatgaagacccatatgtcactcgattatatttttagggacaaaattagatgtttatccaaaaaaatattacaactttataatatctttatctttataatattacaatattgctcaagacaaatattatagatactatatgtaaataagaataattaataattaaaatgttttcaaatgttgacaattctaataatgtagaatgtttgttcacacttattataatagataaacaattataagtattatatatatatattagattaattaatcattattatttagagaaataataaatgctttatcacttaatagaatttatacaatcataaataaatggataaatattaatattatagcaatatacttctttgatatgatgcacataattcaaatttgattcaccatcaactctaatatataagaaaaaataaataaatttcctaattatattattcacaatgtagatatgttatcttgaaggaatatttagtagataaaaagtttttactttcttaagaatcttaaaagaaaattatgactcttgagaatatattttagttcacttttttgataaaaaacattctaaaaaaggggttagacatttaactttttcgagtgaagaaaaaaaaattaattatcaaattttatattagtatcaaattctcaagaaacacgctaaaacgaatcaaacatatttatacatatttcaaagaatcgactttttcagaaattatgtttctttggtatcaaaaaactttttttcataccaaacgtaccatgatggtaattaaatctgtaaagctgtttttttttttttttttgttttaattcatggtttttcagattgcacaccaaaaagcaaaaatattaaatatcaaacatgctcaatttgttcctctcctgaaaaaggcaacgatgtcgtttcatagcacgcgtggcaagtacgtatgacttatgagtcgtcgttttctttgcggccgttacatggagtgggtatcttgttgtgttctatattcattcaccgtcaaatcggagaatcgaaatcggaggaatcagaatcaaagccctgaatggcgccaccgcgaccatctcagggtcaggggatgaataatgcaaggattcgcttcttttccattctcctcgctctccaatacggagctcaacctttgatctcccaacgcttcatcaggttttcatttttcaaccttcacggtttcagttctatacttttcttctcgattcacgatacggttgtaaattttaattgtagttaccgttggttactgcccaaccattttttatatttttttagagtaaaataaaaagtcctggacctgggatttatcattttttttattaagcatagaaaatattcgctattttaattatcgttagcaggattaattattttccgtttgatctatgctgtgattgttgcagtaagattggttagtagtattacttggtggtttaggatcacgagattgacataattgaacaagctacgctaaatattttaactatatcaaagatggcaatggtggcactgtggatggtatgcaatcccacaagaaaaaaaaattaaaacaaaggaaaagaacaagagtctctaagcagtagaagaaatccacttgatcaaatataaagtataaaggaataagtcatttgtattgattcttagacatatggaatttgaaggcctacttaggaatggtgcatggctttgtcaggaagcagggattctagaaattcatttagatttagctgcattattttcaccttgttttgcatgtcacacacacacacacacaattcaagatacacatgctcggaaagtgggaattcagatcaagatcagtttaagtgactggtgtccttgttggataaaatgcagctacaatccttgatatgaaaataaatggttgagattgtgatgaaataaatacacatatatagcattatgaagttgttaaaattcttaactgctgttttctacgtaacggctataactgcacttatcctctaaagtgcactttcctcacattagaggagctaaatccatccttattcattattttagtttctgataatgttacaaatatctgtaggattatccatgcagttattcttactctaaatagcacaacctgtacatggtgatgttttgagcatagccctttcctattttggtcatatgcatttagcttagaattgattttatgagaactaagttgactgttttgccatctatttgttaagatttcgatttacttctttgtccttgtgcatggttccagtaccagcaagtgttccttcagttttccaaagtagagattcaggaaaaaagtgtgtgtgtatataacatgcaaaattgacaattaacactaaaacatatactataacacaagcacttcaatttaaaatgtaagcatttatgcatagttattcttattgaaggacaaaatcaaaattaaaaaggcacaaatgtttcaaaagtcagcattattgattaactcattatccactatcttgtatcctattcttattacatcccatttcatccatattggcacaaaaatttgaaatgaaaaaagaaattgcatatccaggctgacatatctgactgtgtatccaacatggatatgatgttaactccaatattgtattgtatgataatcattatgaaacatttgcttcctcttttaactaaggttaaagtaaatatgttcatgtgattagtggattttaaattgtaacatcttttaagtctttcatttccttgtgcattaaaccataaattgatataataattgtaaatgaccatgtgaagcgtgtcttataatctatttccccctcttcctgcagacgtgaagttattgtgacttcatctgttttgacatgtgaacttgcaaaggtaaatcttgaactgttttggcatgcctaattataaaacctgtactatagtgtacttttcttattctttattgggatctttcatctatctctgtaatctgccttttaggttatttgtgcagtgtttttcatggctaaagatggtagtctgaggaaagtgtataaagagtggactttggttggtgcgttgactgcatcaggacttcctgcagctatatatgcattgcaaaatagtttgctgcaaatttctttcaagaatcttgattcactcacattctcaatgctgaatcagacaaaaatatttttcactgcattctttacatatttcatattgaggtatgttgctacaatgacaacaattagtatttctgctatttttgacaaacccattcgttaacgtttgtgaaagaggatatgccaaattgttatctatgttaagcaaatggtttcactcaagagctgttgtttctgtttaaaaaaactcaaaactaaaagtaatctattctgaggagcaggaattgtcccagtttcttgtgattttggctggccaagttataattttggggttgagtaggttgttttctttgaacctacttatattcttgcagtttgtgatttgggggtaggtcattgacatgcacttggtgttttccggaatcttcaaactatattttgttgggtttggtgtagttcactcactgtttttacttttaggtgttttggataatgttgatttcttgttctgttgtttgggtgcttctgcaacagtttcagagggtgattattgggagactcttctgagaggcttttcttctcttcttctcttactggatagatttctgattaattctttatgctttgtttgggttcagctttttttcttttctttcctgtgtttggatggttcaacgtcttttattttgctgggtttctttttgttcttggtggtagctttggttaaaatggattgtgtttatatgtgttttgttctgctactttaacaaactaaagcttagtgttataaggctagcttgagggggagtgataataaattattgttataaggttattagtcttatactagtactaatagtacttgacctaattattagcataaataggaatattgggttaggggtttgtaacagattacatccataatcatattttcataaactgttagccaccagtattggttttccttctctaacctataatgctaacactgtacactaggcatctgataatggtttgtgcaggcaaaaacaatcgattgagcaaattggagccttgttcttgttaatagttgcggcagttcttttaagtgttggcgaaggctctagcaaaggttctgctagtgccaatgctgatcaaattttattctatggaattattcctgtattagttgcttcagtgctctctggactggcttcatccttgtgtcagtgggcctcacaggttaccagaactttcaattttctcttcaatattataattccttgattgattgatattattatttatctattgattccttctatcacaggttaagaaacactcatcatacttgatgactatagaaatgtctattgttggaagtctatgtttgcttgccagtactttgaaatccccagatggagaagctatgagacaacatgggcttttctatggttggactcctcttactttggtaatgttcttactgctgtttgacttgtgtgatacaattcttagaactgttagatatgttgtcatgcagccaacacatagatatataaaagggtaaactatatttttagtccctaaactttttagaatttatatttttaatccctgaactttttgttatgttttttgtccttggactttctttcaatccttactattagttcctaaactttttttttctgccttacttttaatccttttaggctttgtttgggagagggattttggaggggaagggagggaagggaaaggtttatgtagagacatctccttgtttgggagttttaatatttgagggaaaagatttgaggatttttaaaactcctctgaaatcttccaaagcctaaaaattgttgtcccccctatttggaggtttttagaaggaaaagtaactaaaattactattttaccccaatcaatgttaataaaattattatcctaccctagtcagtgtaagatatagagtgtattaatttttgaaataaggacaaaattgtaaaaatatcttattaactctctattttcctctcttaatatatttttaactctcaaacaaggagtaaggaacttccctcattttcctctctttccttcccctcccttccccttgaatgtctttccttcccttccactcctaactcccaaacaaagccttaagggactaaaagtaaggaggaggaaaaagttaaggaacttaaagtaaagatgataaaaaagttgaaggactaaaaacagataaaaaaagttcggggactataaacaaaaattataaaaagtttaaggactaaaaagatagtaaactctataaaattgaaaggttcaaattttgatattctgacctctgtgtcaagcacaagtaaatttggacctatactttttcatgtcaggaatcaggattgttaacatttatttatttattttgttgggaatgggggtttgattaattccgtacattctagttgatgctaaatttgtaattaactgcaatagagagttgtgagtataattacttgcaaattcataatatgaactttttagtgccttgttctggccgtttttatccatatgcaagagtgattttgccgttaatgaatagatattgatgtacattaaattttaatttcaaatcttttttttttttttattcaattcagatcccagtaattttcaatgcccttggtggaattcttgttggtttagttacaagccatgctggtggtgttcgaaaggtaagtttaactttgtgaaccattactgaattacttttagaatgccctttcctcagatgacagataaaatggtgaatggtgatcagatgttagtctgtccttattgctagtttacaatttccctacctcacgtaataatctggaggttaatgggatgaaacatattacatgcattgttttttcatggtttttgggggatttaatctaaattctaacatgcattattaatgttgattaagagaaaattattattgcaccttatcagtgctcagtagagacagtaactgcacaaacttttggtacttttgagtaactttggagttgctggacatgatgaaaattctttcatagggaatattaggattaaaaattcttcacattttctgttttgtacgaatgtacttacagtgtcattcattctatgtgtttgcaggggtttgtcaatgtttctgctttactcattacagcattgctacagtttattttcgatggaaaaccaccttcattgtattgccttgtggctcttccactagtggtcactagcatttcaatataccagaaatacccctaccaggttaagaagaaggagtcatagaatctgaccatggggaatttatttcattcgttccccctgaaactactttgttttcttatccaaaatatattagcatattgtaaatgatagaacatagaaggcaagcattcttttcgatgtcttctggatctcaatagaattaggttgttatacagagcttcttctttttattttttttttaatactctggaatctttaaatgatcaattgttgtgtggattacaggttttcaatttgaaatttatatcgtagaagacaatgatcaccaatgaaattcactcagaaaaatatttatttattgtcgtttaatcctttatctctgatgaactgaagcattatgataatttttttcttttactgaataggaccatatgttgttattcaagaacatgagaaaggccataactgtaacatcattggatacacacgacatcaattcaattctcatcacattaaagagagacactgcattccgattactaatgactaatgagctgaaaaatagcttttgcatctttagggacctcacgttttgaataacttgacatcaaaacattgcaaacaaactgaaacatgtcttccatatcccaccttcagggtcaatcactacaaaaattaaaaaaggaatgaaaagaaagaaaattaatacacatctatttattaccaataaaaatttataaaaaataaaagtcatttttatctaatttctaaaatcaattataaaaagatactactaaattatatgtaagtgaataatattttttggtacaatatgtaagtgaataatataagtgatgttttttttcccacttatttcaactttctatataaattttgtagaattaaataattttcattaattaacaaaattattatgagggcttttcttatctttgtattcattaatgttagtcttttttatggaaatattttttttaaaaataataattacaaaatataatctatttatttttttcattatgaacatctcttattaaaattatgcatatatctagttatatacaaaatatgaatgtatttataaagatttttttttaaaacaaatgaatttaaaatgatatatatagttttttcatatttatatatatatatatatccttacttatatttagataaaaactaaaaaaactgaaaaaatacattgaaaaatacaataatataaaaaattgtaaagtctaaatttaatatatattcatggcacgtgttatttcactcgtaatttttttaaaagtcatgttaactttgatttttaattggttgatagtataaatctttttatattaacagcatttctttgtactaattttactctttccatcatttatgaattatcctaaagatagtaaattagctttcaaccaaaaacagtaatagaaaaagttggtaaacacatagcaaacctataaattagaaattatcctataattgacttttaaatgtttgatgagagtgcggatttaatttttaaaaaatagaaatatattatccaaataaagtaagcttataaaaatagttttttgcggtaatacaaatatttttattctttaatttcttctctatactctatacaaatttaagaaaaacaaaacaaaacaaagagagagacaaaaacaggtggcggcattgataggtacagggcagaggaagagggttttggtcgttggtagggtttaaggaagcgcggacggagaggagaaaagttgtcttcaaagaagtgttcactgttcaaatcaaaatcaatggcacacatcacaaaccttcccatgatgccactgatgcccagcacttcctcaaacgtcatcaaagaaatcgcgtttaagacgtctccttcagcttccaaagtcgaaatcaagctcttcatagaaaccttctacggcttggaggtcgaaaaggtgcgaactttgaacatgaagggcaagaagaagcgttacgcgggatcgttggtcgcaaaacccgattacaagaaggcttacgtcaccctcaagaaaccactttcgttctctcaggacccttagcactttcgttccaccgtagaagacaagaagaaagagaagatgttgaccactcactgctaggtgtgtagttttggggggttgagtattctcttgtcaattgttatgttcactcttttttttttttttggttccatttgggcataaaaaacattggatgttaaagtggtttattggagtttatcgattgatggcgattgtgctgtataaggattaaaaaagggtctgtaattttggctgcaatatcaaggtttgcaatgaaatcacaacagtgaccacaattcaaaatcaaatgatgattttttttttttgaacttttgatatattgggactaacttgatggtgaaacacacacaacagaatcaaataaaaccatgctcagtttgagaaagaaatagttctactgtttggaaatgctcatagggaatgatattttagctaaattgactgttgacataaatttatctcagtagttctgcagcactctgtgcttgttctaggaagtgagaccatttgctcttcgattataaactcttctctatgcattgtgtcaagtctcaaccctttatattcgaaatgataaattaacttatttatcttaaaaaattaatttgaattaatataattcattttacccatgtatgaatagtaataataatgtaaaacccagaatttgagtttggaagtttgtaggctaggtgcagttttgttatttagtgcttaccataaacataaaaatcttgtcactataaacagtatgactatgattccaagaatctttatcttgaaatgaccaagtaattcgctgatagaaggaacatgttaatcgccaaaccagcataagcaaacatcctaaagtaaaatttgattgtgaattctataaattagcagcatatttcctttaatttgaactcagatattgtttcctctcaagttgcatttttctgcaatgctagagcattttgttttcccctcatgtgcatcttttatgcttcattgctaaacttataagttattagttgatgtcctatcaactgtacgttcttaggggccatgagcttgtatcagtaatctagtcacattttcgttttcttttcaggtatgtatacagtatacttgtattgctttatttcagagtctttgtctctataggaagctacagcctactagaaacttttctctttgaagtcaacaatatcttaagatacaaaatttagtctatatgcttcatataaagaatggctagctaggtgtttttactacaggactttttatgttgaaacttgaaaaataaaatacttttaagacatggagagccttcttctagggtttagtctacgtagaatggtgtttggtgacttgggtgcatcctgtccgtctccaatttcaactcctgctggttttgtatgtaaggagttcttaatcttccgccaatttaaactccagcctgatgaattctttggcttgttgcttaccttgcttaccttttcatactcctgttgtaattcacaatagtctttctgcagttctaccatttgggactttacattctcaagttcttctttgagtgccttaatgtccatagttgcagatgtatggtttccttcttgttcagattggattccaatttgtgctggctctttctcatgcattgctgtcctcatctttacttgctctgaaaatagaacctgcatgttgtgtatactttcattcaggatttcagttggcagcttttatgccaaatcatcactctagtcgttaactctaaaaatgctatgtaattttaactataatttcttgtgctacctcactatcttacatggggtgtatattatgtgaaccagttcctcgacactgttctgtagaattcaattttcatattaaaagtggacttggaaaatacttgattctttctgttgaatctcctcacatgatgattgtcatatctcaacatttctggtctttaaacttctctcttctaaccaattatgttttactgcaattttaagagaatttttttttcaatcactataggttagtaaaacacaatctttgtcataaaaaaaaaatcctttgtgtatagaggaaataatttgtagagtttactgtcaactattttccattgggataggattgtttttctggcctctcctttagcatgtggcttcagggagggattgatttggggagtatttctgttttgttttcatttttctgcttatgaggaggattattattatcctacttatgttaaaaaatttccattcaactttagattctgttagtatttaaggttttcctattgaatgtaaaagtaaaaagtttgtgaagttacaattattaatagaataaattacactcacacctcctgtgtttttctcaaattgcacccaatatccctccctttttatacattacttttactccattttgttaacgtccttaactaacgtcaattgaaatatctgagtagacgaaattgtccgttatagtaaattacactcgcatcccttgtgtttttctcatattgcacccgatatccttccttttatacattacttttacctgacggcaccaatgtccagggaaccagatgcagcggtgatagtggccgaaattacaacaggggacgtgaaggtggaggtagatatgacggtagcagcggcgactacggtggtgacggttgctatggtggaggaggtgactacagtagtggttgttgctccggcgggagtgggtgcgcgcctggacgtcgtgttggtgggcgagaacgacgatgagaaggaagagatgatgctgctgtgggagaaggaggtggtggtggactggtggtggtaagtgaagatgggttgttgaagaagaagagagtttgtaaaactcaagatgtgattttgaggaagataagagtattttagacataaattttcattaaaagtcatgtgactaacatgtatctactttctgttaaattattaaacggtatttaggaaaaaggaggtctgggtgtaatgtgagttaaacaattaaggattttttgtaaggtgggtgagagtgtaatttactcttattaatataatgaataatataatttatcctaaattggttctaatatttaacatgactactgtgtttgtagaacagatgctgctaaatctgaattgtgaattctgctatataaccatcacatcaagttttgcttttttgttggtggaatccgaaattctcaaaactgttgttcatggtcatttgttaatttatcatgtatgaagcttaaaaagtttgattccagagattgcaaactttacctggacaacagctcttaggggcaatctctcattttgtgcagcatgcaggcatgcatcaagtgagagtttttcacagttcatgattttgcacagtcttttacggtcatgctcggtcagtgaagcatgggtctggagagatgtcaatatcagaatgtcaaaactttgttttatttgcctttagttaaaacgggaaactgaatcacaagaaaataagactttaaatgatgaccttgaggtaggtgtcaatggctctatataggccatcatcatatgatcgagtattttctggtagcaattcagcaaaaacttggaacttggttattgaaagatttggatctcttgcaatttcagctaagtaattgtccaagagtctactaatattgaatttcctagtcttctgttgctgttgaatctgctgttgttcgtgcatcaagaagtattccacaattcgttgcactacatctacgtctagcatggtgcattcttcagatgaattagtcatgctactaatgagggaaaagaatagaaaaagacaaaagatagatattagtgtcattagtcgttttcataactcttgggttcttttaaaaaaaaatggtttagagggctgtggagttaaatttgacctttggcattaatgccaattccaatgtgtgaaaaaaaaggagaattgtcacatactcacatgaccgtttttccttgatctccattttgatatcttggaattagaagatcactcacctcagcatcttccaacaccaaactcactctcttttcaaggtctgttgtgagagctggtgatactgaatacatcatggccaactttaacatctgcaacatgaacttacatgagactgcatcttgctgaggaggaataatgcttattaggctttcaataattgtcttttgctccttgctgtgtccactgctttctttcttcttcccactaaaaatactgaactgtaggttacacttttcatgcccatatcctctaaacccttctaactccacctccattcctggcagccatctcttggcatattgcatgatacatttaccaatgatctctggtttggttccctttgaacttattgcagaaatgatccgcataaaatgatcaatgcggaaggctgccacatcattgaaccaccagctttcttgattaggtgtcgcatcctcgcttgtgagctcatctttagaagctttccatgcaatggaatcacagcatcttcttacaatttggaggttttcagcccacggagataggttttcacaagatttcagaacagtgatagtgtctttccacgaagaaagcacaacaaaggtgaggaaagcttcactcttagaaatgagatttccatcttctagttcttcagtcatctctaggaactctgatgcacatcttagtgcagctatgttatctgggctgaagtctatagggaggccataacagaactttagaattgtttcaaatgtttcagatccacctgggaagttttcaagcttgagcacattgccagaatttgagatcaaaggctgaatttccaattgtcctatgtaaccgcactttgatatcaaggggtactgttgttacaaaaaaaaaagtgaccaacgtacgtaatgatgttacagcaaaagcgctatcgtacaaaatgattaagacatgagttgctggtctgttcggtttcttttatttttattacaaaaattaaacgttattttctttatatttcttgtttttagattttgtttaaggaaatagtagaagcaatgctttgtcattttcactatttcccccatgaaatcttaaaaataatgctacatttttttttataattatcagtgaaaacatataaattgaaaatgatattaaaaaaaatgaaataccccgttagtttccccatgttttctgctgttctgttttcaggactcttaaaccttctctaaagttttgtgctttctatctcgagtaattttttttaccctatccaaaaaggtaaaaagtaagtacacacaccacaaagaaaaggaatgtgcggttcttatgctccctgtgataaaactatgttctacaccagtcagtgtcactcattgagataagagtatggtaaaaagacagtgttatgacttatgatgttatcgatttcctgtgctctatatataccccgctgatgattgtttggaaatatgttaataaaccaattcatcgggtgattttctacatttacaaggctttaaatatgtcaaaagagtttgtctataccttgtgaacattataagtggtttcctggacttgaattgaaaagtctgttgggatttgaggagcaatgaacctgcacaggaccaaatcagaaaagaaacaaaaaagaagaaaaagaaaacacatacacataagtggtaggtagaatttagttaaaaatggaaaccaggaagagaaaataagaggggtggggggagtaccattaccatacttggttagacatgcaaattcaaattcatttagacatgtagatattgttattattactgaatttttagctgcctaatctataaaaagatcctattctagaagtaccatgaatgttctcctttgaagctatcagctattgcgatgaatttgttgggaactacgatgcttttgtctgaaaccttctcacttccattggagtcttgttgtgcttgccctacttgaagggacttcatggtgatagtttagctaattacagtaaacttgggatagagtagacactccattttgatgactaaatgatgcaaagggacaatggtataagacccgcgatgttgtctaactttaatgctagaaattgattctgtggtcagtgtagggctgtagttaagacggttggtgacttgtttctttccttattataggttatcaactttaataacattctgttgttgtgtagaaataataagcgtgtgaatgtttgaggccaaatatgcatatatacggtgcatggttttgttaacgtcgctttattttatttgaattttctctttaataaaaaaatctatttcttgtattataaatttgggtacccggagtcttattataatttttttattaggtttacatttcattgtatttttactcccaccatgaccatgtataaagtagattttaattttaagatcaaatattaattttaaaagtattaaaaatagtttatattattgcagaaaaaaaaattataggacatctatctcctttcttctacccccacccttccaatcatttttacctattttatttgggggtcaaaatcattgtcaaatctatctttgattattaagaaggatctgggccattatttgtcccccttcaaccttacatagtgtgaccgatttggcgacttgtggcttataggcattgtacatctatttggcatttatggcaactcgaaaattctttcacatgatttttttttttttggaaaatataacgtacataaaatcgtaatttagtgatgagtataaaattctttacatagtgcacagttgcgaaagtatgttttctgaatcaaaagccatttcgttgaaatgagaaacacaaacatatgagatattcaagcttctggattagagaaaatcagttattacaaaaatagagaggcttatctataaaaaaaaggctacagaatttcatctattttgaaatctgtagatttaaattcgttaataatttattctcacctcctggaaactcgatctctgatcatttataaatacttgcttgtaaagggctttactagctagcaaacaggagggataagaaattaaattaagttgcaccagtgtgttgtcaaactacaatttagttgtccaaaaaccaacgactagtccctcaaagattcatttaaggattgaacttatttttatttatatatgagttagagatcaaattcataatcatatatttaagaaaaaatgttataaactaacaatgtcatatcatattggtacctaaaggttctaatttgcacaattaaaatatggattatcaaagtcatataattacaatactttgagaatcaaaagtgcaattcaatccaagttttattattaatatataatttttcgaagaacttatattttacaaaaaactataaaacactaaactgagttgagatgactcgaagtataatttcaattcttctcaaaatgcatcaagtctaattgtaaaacttgaacctgtataatcagtttcggattagaccagattaatgagatgactgggtcatgttggatatcgtttatgcatgtatagtagaacattattttaaatagtttacacattttcaaaacaactaaaggttgtgttccatctagaccagttactaaaattttcattagcctttaaaaaaaattagacaatatgcaattatataaatattccaaaaaaataaaattaaaccaacgggacccaatcatttcagttatcgaaactcgaaactgaattgagtatagattttatgatttgaaattcagtgacttgttatcaaatcatcaattaagctggtcttcctttatactcacttttaacgtcatgtcttctaagtcgattgtaagaaaatcgacgtgataggtaggtcagtgacaattttataaataattcaattgatttggcatttcgacgtcggttttttgttgaccgtcattgtataagcctctacaaaatcggtttctataataaccgactttgaaagattaacatatttttttataaaaaaaaattaacttgtgtatccattcaacgtcgatttccacgtacgaccgttgtcattttcacgattttcaaagttggttattatagtaaccgactttgtagaggcttctcccttctcagcttctccctcagccattctcgctcagcgccaatttgaaactcacccagattttcaatttgaaattcaaagtcggttatttaaaacaatcaacttagaaaactaagatacaaagtcagttttttcaaataaccgactttgtatctcagctttctaagtcgattttttgaaataactgacttagaaaagatgatttttttaaaaaaaataaaaaataaaaaattttcaaagtcggtccttaaaaaatcgacgttgttcgcttacatatttaaagtcgtcggagacaaggttggttcggaaaccgactttgtatgatccaaataactgaccttgaatgcctatgctgtagtagtgtacacacacaatatgattcaattaagatgcctttggttcagaggataaaattataaagaataaaaatataagataaatttttgaattgaagtaatatatatatatatatatatatatatataaatgtgatgttgatacatgaataatatgtataattagtatcaattaagattatacaaaatatattctacctttaaaaaattaagaaataaatgaacagatatttgaatattaatttagtctttatttcctttttatatctttctctagtttttggttaatttctttagctctagttttagctttgtaacgtttgctgcttttcattgagggatcattagcactcaagaaaaagtgaccaaattgctttcctcaaggttcaatcacagtatcacactattctcttcttcactcattcacgtttcctatttttaaaagttttaccactttaaaactgcacaataacttttcaggttttatatttctttgttcaatagtgtaaaatctctcgaaattttctgtgggtggaagaataaaagaatccattttcaacattccattctttacatttttgttttttccttttcttttatgctttgaacatagtgcttctcttgtcttccttttatcgtcgttgcctgtcttatatatgttccattgatcacttgggagtattgtttcatgacaaaaactttcgtccaatgagaaattaactcattatccaaaagggtgtgcttcaatgcttcattttcttcccctgaaaacccacaagtattccactttctcgctttatatctcaaaagttctcatgaaaaattattctatggtccagaaccacatttccatgatcccaaccaattttcatgtaaccaaattttattagctatttcttgtgtaaattgaattgaaaaccttggttaagtgttaggtagaagttgatcaagaccatagaccacaataattcgttgtgttctcattccattcattcacggttttgttggttctgcatgcagaattttgcaaagatgaatgatttgatgaaaatcgttccaaagctacgctgaactgaagtaacaggctgagaaggacgatcttgaagactctcgtgacattgaagcagggaaactcgacaaccccacggattaccataacctctcacagttcttccaagaagttgaagcaatcaaggttgaaatggaagagatcgccaacctcttattcgaccttttgcaactgcatgaagagacaaagtgcactcacagtgcaaaagtcctacgtggcctaagagaccgcatggtgtctgacatggttgccttggtttgcaaggcaaggatcatcaatttaaggctcgaggtttttgaccaatccaacataaccaatcgcactttatcagaatcctacaaagaaggaacccaaattgatatgaccagaatgtctatcataaatggttttgttggcaaggatcgtgtggccagtgttggtaactaggccaaccaaatgaagaggaagaacatatatacaccaccacataatggttctgttgggttcttgttgtggtgatgctgttgattgtgtttctttactggtggagaaatttggagggggtggtttagagtttggaggttgtgaagccactttcatttcccctttaacgtttcaatggttattggattgttgggaacagtttaattgattcaaatttattcacgagaactagaattcactgatgaatataagtgttgattgtgacttttgcctaatggttatgggaacagtttaattgattcaaatttgtcttagttaacattatttgactatttttaatcttatgatgtgattttgacatgactgtatctcacattttttagttctttgaactccgaagctttctttgttggattggggtcattctataatttaaattttgtgtaacaaaaaataaaatgtttatataaaatattagtattataaaaataatgctcttctatctaaacatgagggttttttatgagaaagaaaggtatgtactaatattacactattattcaattaaaaattataatttatgataagttttataaaattattttaaaattatattaataatgattttataattaaagaataatacaaaattattttatattatcaatttatcatcattaaactcttttcaattgaatcaacttttgttaaatagagtattctcgaatacaattagactaattcgtcttggttttggagggaggatacatatatgatatatatgacaattaattgacataacagaggagtgggagaaaattaaaataaataggtgcatggtacaaattagaaagttggcatgacgcggtatcgtggtatcccgtatatataaaacgcattgcactcgacattacgttaaatttggtcatcctctctttctgtctctctctctctctctctcttttcttctgaattttgttgcgagaagagaatttgggagattcagatctgcgttgggttgggtgtctgtgagaggagaaaaaagtgagaaatggcgacggtgtcccctctcgccaaatacaagctcgttttcttgggcgatcaatccgttggcaaaaccagcatcatcacccgcttcatgtacgacaaattcgacaccacctaccaggtcacattcattctcaatctcaatctcattttcaatttcgttttcatttgccgttggtctctctatttacgacatgcgttttatttatgcatgtgctttccctcacgtgaatcaatctgtgatgacggcatgatatatatatatatatatatatatatatatcattttaattggtgactttatttgggaaatgagttccacgataagttttgatgtaatttgaatttgttaagacgttttgatcaacgataattaggacttgggaggatcaagaggagtagaaaaatgtgctatgtcatatacttttgctctgaattttgtgtctatcggataaaaaaattgagggatgagttttttcttgtgttgaaacttatccctcaattttttaggggaatgctaaagtggtagctagaaataaaaccgcttgtttgaaaactctttgtgacattatcaattatgggatcagcattcatggtttgagttggtgaaatgctagaatgggaagaattttagtcattgagaagggcttcactcaagatccacattgtgttggtttttaagaggcttgttttattagatttctgagtgcttgtaatgcttcttgtttagggaaatgattggtatgtatacactccatgggtgtatacacctagtaaaagtttggaaattgaagagagaaaagaaatatgtgacctgaaagaaagagagaaatagagagaaaaatgaagcggaagcactttgtaggtgtgtgtatgaaggtctatgaatatcattattgtcttgtttatattagccatcatataaaattacttaaaatggacatggaatcttgttttcttggtttatttttttattccatcaacgattcacaatttttattcttgctgctgctagactgcttacaaaaaaaaatttatgtaaatttcaggcaactattggtattgactttttgtcaaaaacaatgtaccttgaagatagaactgttcgcctgcagctttggtaggatgactcctcttcaaatcatatatacaagctcagtctatttatatttatttatttttcaacaattatattagagtgcacattgctggtacgccttataggcactctttatccttacaatttctgagcttggtatatgttaacttcacagggatactgcagggcaagaaagatttagaagtctcattccaagctacataagagattcttctgttgcagttatagtatatgatgttgctagtgagttttataagttcttttatataccactttcattatctaattaacatgatttatctggatctttatcaattttctcatgaccaaattatttgaccatgtaactcaaaaaagggttttgtagtgcatgaatgtgttctttaatacttatgtgtgagtgactgttctgatcttattttctaagacacattatgttattacattcatctccctccctatttgtgtgtgtgtgcttgcttgcattcgtgcctgttctcttatgttttatttttatcttaactgtttttgcatgtgtatttggaagtgctttagttctcatttttcacaactaatcaaaattaactgaaatttataattatttaacctgggtaagctgttcttatgcagacaggcaatcatttctgaacactaacaagtgggttgaggaggttcgtacagaacgtggcagtgatgttatcattgtgttggttggaaacaaaactgatcttgtagataagaggtaagtactaatttggtttatatgattgtttaatatacagaaaagttaaattcttaactgttaagcggatgttttagtgttttttattatcataatggggtttccatattatgttttgatccttctattttagtgtttacatgttctgtttcatccgaaaactgtaaaattctggtagactaaatatagttttaagatggcttaaaattcatctcaaggcattagctttgcatgcattagtagttacaaagagcagaaattcgtttaccaagcggcttgccctttgtgtttgttattcgcatattgtgattttactctgtgaagcttttcttacaaggccattttgatacttaaacaggcaagtttctatagaggaaggagatgcaaagtcccgtgagttcggaatcatgttcatagaaaccagtgcaaaagcaggcttcaatatcaaggtgaaaattagtgaattctgcattcatctcaatatttttagtttattagagcaatctcctgaactatgatgcacgtgaccatgatatatcatattttcaaattgatgatctactattgtggtttctcaacttcatcttccttcacatgttggctcttgtgtacttaatgctttctgtcaatccaaattgcagcctttgtttcgtaagattgctgctgccttaccagggatggaaactctttcttctacaaagcaggaagacatggtcgatgtaaatttaaaacccacggtgaattcatcccagacagagcaacaaggaggaggttgctcatgctagagaagactattctcgaaacagacaataatttgttcactgataaaattctgggattggctgcttaaatggaatgatggagctgaaggaaaagtgctttcgtatccatgacccttcagtttttgggtgagggggacaaattgcagtaatggttttgatgtacgacacaaatattgatagttatttcttttatttgtaatacaattagtcccttgatgtaagaatacaggtaataaacaagctctacaaattgttcctcttaggtttatgttataccaccctccatctagcccttttctcttggtggcacccatcgtcctatccaaagcagaattgcctggtttttagggatcttgtttgactcaaaggcccgaccaacttgactactgaccgaaccattctataaaatatggtctgtccagcattgaaaattgatttttatttaacctaaactaactcaatctcgatgtataaggatcttaggttttgattttctcaacttgattggacctgagctgatgatataatcactcataaaacttaactttttaagtatattaatataaaatattattgtatgttttaagaaattaatataggatcatgttattttggtaaaattcctttttaaaaaaataagattattcttaaaattaacaacttttttctaaaatgcttaaattaacaactagaaactaatctatttgagatgtaaagattattaattgagtggagcttttaatagtacaacacttttctttaatgacaagtctactattattatgtttggatggattaaaagaaaggtttgttgatttaaaagaaaaactaaaacagtatcctgaaaaagtgatcctaaaccaagaaaaaggcttgataaagaaattgaaaaaatagtaatttgttttccgtttcggctagtgagatgaaatttaaggtcacttatagtatgtttagtgataaattcatagtcaacatagatccatgttttaactttaattattgggagttggaagatatatgtagacatcatgtgttgacaacaatatgcatgaggggataatccaaaggaatatatgttcatcagtattatattattatttggtggacacatcagccttgaagtctttgtaagtgtcactgcctttttaattgcattcctttatattctatggcgattgcgattagagtaacaactcacctaaagaaccacccaattttagatgtggaccaattttctcataactatatcagatatcatgatttttcattaatcataagttatgtcttattggtgaatacttgtggatctcattataaaaataaaataaaatggaacagtataaaaggaatgaaaaacgttcataaaagttgtcaaaatatacgtttatgcttagataaacgacttaggcatttccaacacttgtttggtctatagttagattgttcgaaagatttgtctttttacgaacaaacgttaatttgttagttagaatgttaatttagttatattattcgaaagattaaaaacaaaaattttcaacaagaggcatttgtctttttagatacaaaagattaatgtgtttttgtatatataataagataggcaaagaggtacgggtgtcatttaaatataactaaaagttgtttaccaccaaaataacttgttttaaaatatgtaccccaaaaaaacttgtttaaaattgaattgagatttatattacatatcttcttaattaaatattttgtgccttggttacgtgaaggggcactatacccaataaaaaaagaaagctacgtgacaaccgtatgaaggaaagagacaccaacaaactatattctgaatgagagcaccacgagtcacgaccaggaggtggctattccagcaggtgaaagcctaattatgtgcgtgtcgtgagaaagataagccaagtatttcacaactaaaaaaaaaaaacatattgaaaaatgccaagatgtcaaacgccttggataagaatacgacaatacttttccagaatagaaactaaaattatatatgtttgtttgatcgaacatgttaaaactttattttagactttagacaacagaaaatcgtatttttttccaattaataaacagaaaacatataatacgtcgtgtgttttgtttcaggtttcgttttcttcgatgtgaataatacatgccttatatatatatatatatatatatatatatatatattacttttctcggttctttttatccattaataaagttcatttttgtttatttatttagatattttttaattataccattatcaatatctagctaattcttaaatacttttacactcatcataaatgagaaagaaataatactcttaagcagctacaaataattttaacatcaaagaaaattactaatttatatatatctttgaccaacagatcaggctattcaatgcgcacgaggaagttcaaactaaatgttaaacaagaacactgaaaataacaagacagatgagtcggagtgccgcgtacacaacacaacccacaaagcccacaacaaacaaacagagtgggtttttgctacttttaggcccaccgcccaaaacacaagaatgtgacgctgtcactgtacgcgtgagagaaaccgacattgccacgctcgcaccatcaaaattatactaccatgctaggctattgagctctgataataaaggagagttgcaaaatcctattacccaaaatttaaagaagaaaaattatcactctaaaaaaaaaaaaaaaaaaaccatcaatgaagaatttttaaaaaaatcctgttgtgctctcaaatattccttcttcacgttgtttttgtcttgagtgagagccaccttgatccttttcaaacactcctactacatcgtaccaacgacgacaacgaaacctacaatgccccacttaatcacacaaccggaatcctcctccgattcgttcttccccggtggcctcttcctctacgctcacacacttccttcttccttcgcttccttcattccttcagacccggttacagtatcttgtttttgttggagacccaaaagaaggttgaatgtcgaagagagactttgtggcatagctggtggccccggtgccttcttgtcgttgagtttctccttaaacggaaccgctgcggatcagatatatcgcccagaatcgggtgaaattctggggcagcatcacaacaaggtgtgtgaagaagaagagaaagacaaggtggggctcaatggatcgggtgctatgaatatgaccaaacatctttgggctggtgctgttgctgccatggtttcaaggtcttcataattattccttttctttttacagaacaattactactcttactcttcacaatttttctacactcaagttccctcctctatcactgcacctattcttttcttagttggtatggcctttaaggtggttattgcacgagtcaataagattcgtgattgactgatagtcaataaacttagctgtgcactctcattgtaaaatctacattgtcaactaatctaaaatcattattggtatgacttatcaagtagttattataaaaattaataaacttactatacattacatttgtgactatgattcgacaacagtattcaagacttttacattgtcagtgtatgtaatatttattacttttacactgccaatttgctgaagtttatctttggacctattcttgttttttgttctcaagtttttttaccaaatttagaaggagaatgtggtataaatttgtcatgtggctttattctgtttggtgtatcaggacttttgttgcgcctctagagagacttaagctggagtacatagttcgtggtgagcagaagaatctttatgaacttattcaggcaattgcagcttctcaagggttgaaaggtttttggaaagggaattttgtgaatattcttcggacagcaccctttaaggctataaatttttatgcatatgatacgtataggaataagctgacaaggatgctggggaatgaagaatctactaattttgagagatttgttgcgggtgctgcggctgggattacagccaccttgctctgcttgcccatggacactgtgagtggaaattcaggatcatgttacctgcatctgttgtctctagtgtttacgttttgaaatgtgatgctctgaggggcaatacaataggataggacttgtgtaactttattgttaatgttcaagtatagataaactttctttggactgtgatgctctgagaagtatgatatgatgggtatgaattaatacaggtttgtctagtgtggtgtttgtagacagatttgatgtgatcgcataggtcctacttacccaaggagttttaatttgcaagaagctgtagcttgctacatttcaaattcaatgtcttttaactggtgtactttatgctagctagttggcaaaactaaagaggattgattgctgctcttcttatctacccatctttctaaagtgattctatgagttcactggatgcttagtcccactcttatctggtgaccaactatggttgtttagagctcttaacatttgcttaataaactttggaagttgtaagcatatctttggtcataattcctgcattcttacctttgatgaatatgttcctccatgatgcttcttgtttatggtgtaatcattgttaaataacaaaaacttaaacttgaatcatattaagggggaaaaaacatgctcaaggttgtatttgaataccagtgttcatggtctattgcacaaaaaagtccttgtcaagaatatcgtgtagcctactcaagcaaactatttgagtgtagtgcatttttttattgaattttgttgtacttgcattctaagattgatttctttcagatcaggacggtaatggtagcacctggtggtgaagcgttgggaggtgtgattggtgccttctgccacatgatcaaaacagagggcttcttttctctttacaagggtttagtaccttctattatcagcatggcaccttcaggtgctgtctactatggtatttatgatattttaaagtcagcatatctgcattcacctgaaggaatgaaaagaatccaacacatgaaagaagagggtgaagagctgaatgcattagaacaactggaattgggtcctgtcagaaccttattatatggtgctattgcgggttgttgttctgaagccgctacttacccctttgaagtcgtaaggagacagcttcaaatgcaagttcgggcaacaagattgaatgcactggcaacttgtgtcaagattgttgagcaaggaggtgtgcccgccctctatgttggattaattcctagtttattgcaggtattgcttctgttcttaataatatgctttgatcaataaaagctgttctttaaatttcagtaaacaggtaaaacagtggatgatagttgataaagtgaaacttatatttcataaaatttgagttttatgccccatagtcaatgattttttttttttttaaatcaatgcatttagcaaaattgcaaggcacatacaatggttggtttcgatgaagtttcttacttgaacataaaattcttatgaagatgtgtatttatgtcatgcacagaagctgctttacaaccatggctgtaaaatagttaccaacaatttttaagaaaataactgtttttctccttgctatggaggataacctatgaaattttcagagctatccatggcatccaaagtagtgcatatttgcaagggaggattgacgaattactaatttactatatatgtattaaccatgtgtagattggatgaattgttccaaagcatcccaaagtccatatgatggacttgtatgaaacttctttattctttttgtttcacgaagtttggagagttgcttttcatcttagtccatttaatatgatattttcaatttttgacttttcaggtgttgccgtcagctgctattagttattttgtttacgagttcatgaagatagttctcaaagtagaatcaacatagatgatttgcaggcaatactaacgccacatgtatatatttgatctttgaagatggggatttctcctcatttccttaatcatggccacccttatgcggggggagtcgagggtgtctcacacaaacaatttaatggtgtctttctgttgtattttactgactttatgtttacttaataataatccgaacaaaggaaaaggaatggggcataaaaaaaaattatgcttggctaattagatttgaattttccttcatgaagcaaatcctaaaaaccattataatagttttttttatctttctctttccgacatgatattgtgtcaaatcttgtacctaattggatatagaacctattattttataacaaactttttaaattaaaaaaattgacaaattgatttttaagttatgcaaataaaatatatttattattatgtgtgtttgaacaagtatcgataagatgtgtgtttgctttgctatttgaattgtttacctttaattttcacgccaaagggaagaaaaaaaaatgacacaaaagttataatatgtgtggatccattggcttcaaacgtatctaagaaaataattttgaattaaattgattttattaaaattgattttgaaatgatataagttatgtttcattataaaaaatatgattcatatttaaatattttattataaaaaatttaataataatacttagtatacaatatttttaagtaatgcaaaaattatttagaattattttaattcaaaattaattatggtcataaaattattccctaacaagtgtaaaagtttacataaaatcacaagaattagtatattaacgtgattttagaaaatccagcatgaatcaaaaaaacattaaatttagaatattcatctctaaacaatttcttttttggtacatatgtccacctctaaacaattgaccctatatttattttcttagcacatatcaaaatgacgtcatataatcccgggtttaggccaaaaaaatctgagaagctgcgacgaaaaaggaaggataagccaaatatcagtcaaactggaatcacacaatgctctttgacttggacaaccctttcaatgtctttttcttctctttgatagtacaacacaacacaacaatgctatcacagacaagttcccgcgttgaaaacttttctttgttcgttcattggtatttggtacatcctattcatctccctcttagcacccattacactctctctccgcgttaaaaaatactatctgacacacaacccatctctctttttagtttcgcttagatttagaaacacagacttttccaaagtgctcgtttacctcaaacctcagaaaaataaatatcgagttatacttgttttcttttgtcgggagacaaaaacattgatcagttcagcttctcacttccatggctgaggccagacactacgttcccccctctcaattgggtcagctttccttcactttaattcctctctatatttcatttctcatcatttgacattcacaaaattcaaattctgaaaaaagaaaccttttttcaaaagcaaccatgatagtgaagcattgaaatgccatctctttatgttttaacatttccttcgacgtatttattgtttttgactttgttttcaatttctatgctttgatggacacagatattaagcaaattattttagaagcacagcatagatggctacgtccggctgaaatttgtgcaatcctcagtaatcacaagaagtttctaattgcttcagaacctgcacatatgccaccaagtatgttgtttctcttctgccaaaaagataacactagttatcttaagttctcaatagcttcatttggagaaaaggatttaaatattgttattttcttttatttgaagggaggacggggaggattaggattttaatctattcgaaaaatctgtatcttatgaggactgggacctgcatgaaaacttgacacaattatgcccaatatctaattgcaaaatggtcattctcaggggtcttagtgagtggttgtaaaattgattttggttaaaattaattctaagtgaagtgatttatatttggataattttattctaaaagcaagttaacaagagaactcagtttatgatcttttatcccatgcaaaagttacctgaggttgattttactcttaatcaaaactgggctgaaaatcagtttctcaatgtgagaccaaatatatgagcatttacctaaaattactttagctgatatttcaacgtgactttagaagatccttccaaacatgcacttatcatatttttccttgacattaggtggttcacttttcttatttgatcggaaggtgctgagatacttcagaaaggatggccataactggaggaagaaaaaagatggaaaaacagtcagagaagcccacgagagactaaaggtaaatatgctgcatgtaaggttataagtcttaagcactggtacaatcacatctaccataaaatgagaagcaaaggtcgctgtaagctttatttactatcattaatgttaattctgctttgggaagtaaaatgtattgagagaatctttcttctttataaactgttgcattgaatgattcatgatatgatgctctcaggctggaagcgtggatgtgttgcattgctactatgcccatggagaagaaaatgaaaattttcaaagacgcacatattggttgcttgaagagtaagtgtttctgcttaatattttcacagttcagtataaaaaatcccctatttatttaatgttctatcttcatttgcctgattctgctctatcttcttctctcacctcctcctaactttctgccttccctcattatcggtctcacagacatatagtaatatccagaaaggaatgaagaaaacctgggctcttcttcttatgtgtttgttcttgcttgaggatggtgtgctttaaactagaactactgagatatatctgtaaatgttgatcacattctattggtttaaactaattataataaccttctagaaattgctaatttgtttctatggttcttatctgtggaatgggctcctcttctcaccttttttattcaacattgttgcagggaactctctcacattgttctcgtccattatcgacaagtgaaggtaacatgttacgattttattagtattttttgcctaattgttatttgacaaaagctcaagaagaattgcttacttttacattcccagtaaaattaagagaacaatgaactagtaatatgtaattgtgttgtagaattatatatttagtaggaaagtaaaacatggaaattccatcctaacttgagtatggtattcccccaaatcatgtaactagactttccatgctaataatatatactgcctaaaaataacaaaactggcactgcttccttaatcaatacttggtctgataagtttcaaaaccagacgttttcttgaatgatgctataaattggtgacatattcctttctatgactatgcagtatgcacaattctccttccccctttctcagattttgactctgtactgtgatccttaaaaagtaaaaaaaggctaacattctcatcaggagtgaactttttgaactatgtaataaatataatcatgagttgctatatcttcccatctatgaataatttcatttgggccttcattcctttctctcatctgtcttgttcaaaataatcagggaaccaaggcaaattttgcaagtgctaaagaaaatgaagcatctcttccttatgctcaacaaactgataaatttatgcccaaaacagagatggacacttctttatcatctactcttcatccacatagttaccaggttccttcacaaactattgatacaagcatgaacagtgcccaaacatcagaatatgaagaagctgaatctggtatttcttttgtgcgcattaataatttaaaatgttctgttttcaatttttcatatctagaggacattctgagtagcctttttgttgacttcgttctttgtatcactttcttgtgtgtatttaaattttttaattgtaattttacagcattcaataaccatgcaagttctgagttttattctttcctcgagttacaacgccctgttgagaagatttcacctcaacctgctgattgttattctcctcagccgctcataagtaaatttcttcattttaaattgttcttatcagtttaactttgatgcattgtcagtttgtcactgtaaatttacattatcactcattttttgaactaattttaagaatcaaacctctttaaatgatgtgactgtgcatgattgcatgatagtgtaaaaaactttacactaatattgcatcaaaatcaaataccttgttataaatctttcatacatactggccttcttatcaggaaagtctgtacctaacatgaattgtgttattgaaactgagacagatgatcaagagaagttacatgtcattcctggggtgaattatatctcactcactcaagacaataaaatcgaagacattcttaatgctggattgacatacaaatcctcaaaaccccttggcttttcctcatgggaaggtatcttagaaaataatgctggaagtcaacatgtgccttttcagcctttatttcctggaacacagcctgataacatgggaatcaatggaaatttttctcaaggagatgagataatggtgccatatttgaccaccagtattgctaagcagcatgagaatggaagtctcattaaagctgaaggaaaccggcaggtattatgtactagtaaaatcggtacttcatctgctagtggtacttatgttatataagaatatttagttctaaacaaatatccaggctctgcagtatgttctgtaggagctttgacaaggtattatatatttatgtcaaaagtcaaaaactcgaaaataatgccactaaaaagtgttgttggtatgatgctgcaaatatttttgacatctttattgtttcgtgtttctgcaaatatataatcaagcaatggattttgctttatgtgtgactattgtgtaaacatgttacatgtttctttccttcaaactcatttaattgattaaagcttaatcatccttgttaacaggcttatgatgttgattctttacgcatgtccagttggcctatggatagtccttattcaggctcaacacgtgaggtaagttgtagcaaccgtgagcaggaagttaatgatgttgattttcagaaatccttggaacagtgtcttctacattcacacaaacaaaacaaggttctcatgcaaaatgatcttcaagaaaaacttttgaatgaaaaagaaaagataaaatcaaatctagaggccaatggaatagaagacacatatttctcttttaaaaggactctgttagatggacctccagctgaagagggtctgaagaagcttgacagtttcaaccagtggatgagtaaagagcttggagatgtggaagaatcaaataaaccatccacttctggtggttattgggatacagttgaaaccgaaaatgaggttggcaacacaactattccttcccaagggcacctggacacctatgtattggatccatctgtttctcatgatcagctttttagcatcattgactattccccaaactgggcatttgaagggtcagaaattaaggtattttcttttgatattctgcacttgccatcagttttgatcacaagttcattgaattgttgtagttgcttttttgcttatttttcagttatattctgattatttatttcttcatttatgaaaaaaaatttataggttatcatttctggagaattcttaagaagtcaacatgaagcagaacaatgtaaatggtcatgcatgtttggcgaggtagaagtgccagcagcgatcattgcaaaaggtgttctttgttgtcatactccgccacacaaggttgggagggtacctttctatgtaacttgttccaatagattagcatgtagtgaagtgagagaatttgatttccaagtcaactatactccagaagttaacactacaggtgagaatagtggaagcacttttgatacttttagtattcgatttggagaacttttgtccctggggcatgcctttcctcagaattcagatccaattagtgtaagtgagaaatctcaactgagaagtaaaatcaattctttaatgagggaggaggatgatgattgggacaagctactgaaacttactcaagagaaagatttttctccagaaaatttacaggagcagctgcttcaaaatcttctgaaagataagttacatgcatggctccttcagaaaataactgaagaagggaaaggccctaatgtattagatgagggtggccaaggtgtgcttcattttgcagctgctcttggttatgattgggccctagaacccacaatagttgctggtgtgaatgtgaactttcgtgatgtaaatggatggacttctcttcattgggcagcattttgtggcaggtgagtacctcagtgcttgtgaatgaaacacatttcatcagaattgaatttatatgtaacatccttgacatttcattaacttaataggatgggtcactgatattaattgcaatttttcaagagcattagtatgtgaggaagaatagattagtgccgagagaaaatgtgaaatgtgcctaaaagaagttagaatgctcttacttgttgatactcgatatacttcattatgtttgaaggatggaatgccatttatgatgggatgcacctgagtcttttgttatgatgagttccttttttcattttcttgcatactcttgtcatctttcattaagttcttgcatcttacttaatcagggagcgcacggttgctttcctcatatctctcagcgcagcacctggagcactgactgatccatgtccagaacatccttctggtagaacaccagctgacctagcttctgcaaatggacacaaaggaattgcagggtatcttgctgagtcttcactaagcgcacacctcacaactctcgatttgaacaggaacgcaggagaaaattccggagcaaaagtagtccaaagactccaaaacattgctcaagttaatgatcttgatggtttatcatatgaactgtcattgaaagattcactggctgcagtgtgtaacgccacccaagccgcagctcgtattcatcaagttttcagaatgcaatcatttcagagaaaacaactgaaggaatatgatgatgacaaacttggattatctgatgaacgtgctctttcacttgtaaaaatgaatgtgaaatcacacaagtctggaccacgtgatgagcctgtccatgctgctgcagtacgaatccaaaacaaattccgcagttggaagggaagaagagaatttttaatgattcgacaacgcatagtaaaaattcaggtacatttgtctctaacatgtgatatgtgcaaatggcattattatttatgtctatacctttctaagccttttggctaagagcatttgtagtatttattgtttgtgttgaatgtttaatcttattctccctttaattggatccaatttataacgtgtctatttccatggtataggctcacgtgagaggtcaccaggtcaggaaaagctgtgggaagataatttggtccgttggaatcttggagaaggttattttacgttggcgtcgaaaaggtagtggtttgcgtggatttaaaccggaggccaattctgagggaactatgatacaagatgtatcttcaacagatgatgactatgatgtcttaaaagaaggcaggaagcaaacagagcaaaggttgcagaaagccctggctagggtgaagtcaatggttcagtatccagaggcaagagaccaataccataggctgttgaatgttgtaactgagatccaggaaaatcaggtattttacctatttgtgtatatttttaaaaaagtttctcactcgcggaaaaaaggggggaaaaaaagtttctcaattatcctgctttaaatcattttctcttctagacagtatataacagcagtagttttcattctgtacaaagatttggctcttttaaagttaataaagatacagtaatttcagtttgcattttgaaaattaatgattaatattataacacattcatgattttatgatgcatgtgtatgtaatatatgacttgatttttccgtcacaactcaaattacttattttatttttttaaatgagttacttcagaggagttgaattctctgaaaaagagtgtaaaaaaaatgcctgaatatggtttttctccctttagttatttacataaagctcaatttgcttctagtaaagccaaagagccttaaatggcactggcttgatccccggattgaatcccctcatttgaaaccaaaaaataagttgcttctatcgaatgaagctgttaaaggtgtatattggatgggctaccttaaaaagcttgttaagaaattatatgtatatttgtttaaactacctgaatatagtatcttcttgtgactgccagtagagcttagacttctgtatatgtcttttgcaggtaaagcatgagagcagttctaacaattcagaagaaccgagagaattcggtgacctcaatgatcttgaagcattgttggacgaagatattttcatgcctacagcaacttagaagttagctttcgttgttaattgtatgacttggaatttcccagcagagttaggtgatcaactgtctcactttgattgttatagtaaattagtaatcttaattctcattcttttgtgttaaggggtgatttgctaacatatcacataaatttaaaaaaaatgcatagctattaaaacaattcttacaatgcaaaataaacatgtcaggttccctatcaaatgcagaaatgagccgtgcacatttttcttacacaagccaaaattttcaattcatgctcagtcagctgtaaggaggaaccaaggttcttcccagttagatattgctggatatcccctggttgagtgttaaaaagttgaaccaaacttaactgtggaagaactgaactaaatttttttgcctaaaccaaactgaattgtattttttatctgacgaattgttttctcaaatccaaaccgaactgttcattgaaccgaatttaaatgaactgaatttaaatggaccgaattatgttgtgtactgatacaaaaaaaatggaagggaaattttatgattcagttcagttctgctttgttctcaaacgattcggttcaaatttttagatttataacctaatcgaaataagtgacaatggtaggagttttgcagtcccgacgaagacagggttgttaactcaccaaagaatgcccaactattagtctattaccaaagtattcgtcaatctataaaatataaaataatctaacatgagttaggaccaatttccatttcattgtgtttctaatgttggttgaacgcttgcaaccatgaatacacatcgttggtgaaattttcacccgatatatatactgttcttattgtgagaaagtggaaaaagaaaaaaggacggtgcctagcactatccactgtacatgccaaccacctaagtataccttttcacaacccgtatcctctagaggatgtaacagctcctccaacaggttgaataaagggaaaacggtagaaaggaaaataaatatggaaaccatgcaaaaaagaagtccaaatgatttaagagagttatagaaatcctccgcctaattcctgttaccagagccaaggctctcatagaacaaaatgtacccatggtctgtattacttgaatactcctgtgatgatccaaagaaagtctgcacagcagactcgtcaatcatctctacattttcgtcatcaaagaataaccagtggttatggcttttcacaagactgacataatgcccgtggttgggcccactcccaacatggacaactactgcaaatagagaatactcgatatccgcatcttcaactgtgttactcaacttcagctcaagggggaaaacaacccggtaggacagcttcttgtagcggcctagttgttccatgtacttaaaccgcttaagatggatgaccaagatgtgaggtggtttctttatcttcatcctcttctgagcttcttgcaaactaataccacaagaaagttggcatcttggtcatcagaatggtgaatgaacatgaaaaacaagagaacagagcacatatatttttacacactaaattgacatggctaccaaatcccactcagataacaggtagaagaaaatgtcaatcaatggaaaaatgaacgtatcatagtttgcttcttttaaattgtagtattagtcaataaacatgaatagcagcgcattctaatttttattaaaaggagataaaattttctataaaccatagatgatattcaagctatttgccatgtgttagatcacaaacaatttattcctccagttaaaaggggtagaagatgtacctaagaactttacgagacactattaaagatgatcttgatccaaatatgattttctgaatatttggttttcaataaagtcaatgacatcaattaatccatgcagtcaattcaatctagtagtacaaggctttattgctattgttcttagataaagaagcagaagattagttcagccaagcacgtgattcaaaatggttaaacaagctctttaaattttccagaacactcaagaaaccaagtaaagtaacaactgatgccaaagaagtagtatttcggatttcagataattatagaaacataatttgtacctaaaagccatatatatacctgcagcatttgtcgcaaaaaaatttgtcttcagcattcagtgtctcggtggaactgaaatttttcaaacagcttgtaattgaactgttttgctcaatatcaagactcaagtccaaaaatgtttcatctctagctgtcactgtttcacattgcaagcaccttgtctcattggtgagtattccctgatcagagcaagttacaacagtaaaaatcctaaaaataaaagtaaatcttattcttctgattactacagagtacaaagagcaacaaaaacaccccttcccccacaagaaaaatacataaaaattgacagtgaaattactgtgttttacattgtttaataataaagttcatctataataaattagtactataaccgtatgccaaattccattataattcacataaaagccaatatgaatgaattacccttaaatgtaacaatacatgcccacttaaagagataacactaattgactggatccgatagaaagtttgctaattatggtcccttcaaattttgttgcaggcaaaatgcaaaatgaaaacattgaattgacaaagcaaggccacctgaaaatttttgtgtacccaagtaactaaaggctctttgtgaacaccattagcgtgaccattcttgggcccattaacagccttttcagaaggtggagatgtctcctgatcagtttttgcagcctgagcctctttctccagaatgtcaacaagttcattcagcaaaaagttcaagaactcgtgggcatcctaccaagagaagattcacaataacaatgttgtctctaatgaaaaactttgacaaaataagagacattatgcaaccaatgaaacattgaatttaacagataataacaatcaatgataaataacgagtacactttacagcacactgagttcagtaacattatggtaaacaacctcactgaaaagcaacaaattgtcattatacaaactcgaataaatcatttccagagatggacactcatcatgagtcacaattatttactcacaaaagaggggaggggggactggggaactaacaagccaaagcaccgtttatatatcagtgatatacagtcaaagcatgactagacaaagtgaaaagggttgttgccaaatggaaaactgatataaaaaagattatgcttcccacaggacatataataatataatagaaatacaatttaaagtgtatatgctccagttcaagtaaacagacttatttgcatataaaaagactgaaaagtgtacaaccaacatgagcatttcaacttaatattataacaaatagttcaaaagtatttccagtttattaaaagatgttcacaccaagttcaagtgtacaaattgcaaatctgaaaatttggtccaacctactacacagaagcattacaaaagaaatacttatctaataattgatctaccaagaggacaactagtaatttgcctcaaaacatagccagctggaaatctttaatacatatgatagaatctctagttatttaaataagctgctacttgggagcaagggcaattgtgtatggtgaacgatgcccacaagcaaagaatcctttcataagcagggagaaacgcatacatggcaacatttgcatgtgtgactatgataaaactaatctcttgattataatataaacattacagtcaaaagaaatttacaggttttctagaataatcacctttctgctcaggaagttcatttttgacagtttaagcacatacctggtgcatatagctacggaagagttcattctgttttttcaacctctgtacaaatcgtttgggagcaatgacacctgtttttttcttctgggaacttatctacaccaaaagaaataattatattacattcatgaccaagaaagaaataaataggcatgaaaatgccattaaatggacatttgattagcaataataaatggaaggtattatttggcatatacaaaatgaagatacttacaaaaggcacactacaaatatcttgaagcaagttctcaggcataagagatagccgtgtaagtgcccattaaatagacatgtgtttattaattagacatttgaaacaatgaattgagcaaaaattctatagatatacaaaatggaaatacttgcaaaagcacgatgaaatagcgcagagccattttcaggcacacaaaaatatactcgaacatactataaagaagatttagggaagcataaaattgcctaaaccaatttcacataacttgaaggcaaacagaaagggggaaaacaaataaaataaatgggccaaaccaacataaaacacactggataaatgaagaaatttctcaaggagaaataatagcatccatacaacaggcaaaaaaaaataatagcatttatacccgagcatattacaacacgaaatttagataaacatggaatcccctttgtcaattccttgtctctcagacaaagagcaactaaaaatatagaacagctaacaaaaatgtcagctagctgggcatatatattttaggcattataagtagctagtcatgttttgataaacttcaactgatcaatagaataaaacccacagtatgctttgctgggaagtactgaagcactaaataaattggcatgcagatttctctgttacaggagcatctttcatcaacattctaaaaatccttccataaaacggttagaaaaaggaagtctatgaggaaaagcaagtgcttaattgcgatcacgagagcgagattttggattaaatggaggcaatgtatttgtccgagttttttcagagctgtctatttaatggccaatgttattaaagaaaacatggttacagattcaacaataaagataacaagaaccacagtgaagcatgcaaagaacaaaaaggtacttgtttcatattattattaaataaatgaagaataaaaaaaaaagctaggaaatcaacaatttatttcatgagagtcctaggcaagcaaaatagccacaaccagtgaagacagtataactttcaaatagtgaatcatgcttgacccaatcaaatatgaacaagcttagaggcattaagcatgtaaagttgagaaatttccaaactaaagactgatttacctgcgaaaataagtccgctaagcaagttaagagattttcttccccgtccaatatgcttttgttatttccataatactctagtaattgttcacgaaacggaacacaaaagtatagtgcctgtacaatttggcaaaatgagacagttgttagcaaagaaccctaaaagcctttacaaaaaataacaaactgaccgtcttcaagtattatcaccagacatatctagtgccctcattgatattttagagatggtaaacatattgagtgcaacaagacaacaactacttttaaattgacgtatgcatctaaagagacgcatataatactattgaatgaaacatataaaacattgaagagcaaatccaacttcaaagtttaataaaactaagaatcagcgcttaaaagaatctgctaaacaggtcaacagaatgtccaaaacaataatatacatttaagtactaaactctctcctgaagatacatatgaaactgcaacaaactttgcatagaagaatcaataaaccatcaacacaacagattagagtctctatagaacgcgaaaaatagaatggaaaagtaaaaaacgtaaatcggaataaagacctgcaagacgctgttgcagtaacaagtgttgccgaaattctcgaggccaaagtaacgttctccttcggggaattggtctccgagagccttctcaagcttggagcctgcagcacccatgaccgcgttaaacgatcacaaactcagattcctatccgattcaactcagtgactcgcaccatgaaatgctcaatgaccgtttggatcgttggggttttgtctcagaacgaaccttttcttgtgtctggttttctctacagatacgtgagcagggaacgaaacaagggtttcgcgtgcgagagagtgaggacgaaaatgctgatgaaaatttaaagaaaaattgaggaaaaataaaggcttaattaatttttcatatataaaaaatatgtcatttttagattattacttaacattcatttgtttttcaactaaatatatgaaaaaaaatcatatttcaacttaatatatgtggttaattctctttcgttaaatgatgacatgatagacgaaatgtcacttcatcaatccttatcattaaacacgtcattctctacttctatttcttcccttcttctccttttccaatgaaaaccatcacaaacatgccaccaccgtcgtccaatccagtgccaccaccaccgaccgcgtcattgcgccaccactgcgctgtcaataaaaaacaaccctttccccttttccttcgtgacaatggtcaaactgttgctcatgaacttcatagagttcctcatcgcggttttgatctcgcataatctctagagaactcttgggcacaacccttttctctctcttgacatcgtattcccctaaagaagtaccattacccttcttcttcacactcgattcaacttcactctcactcttgctctcactagacgtagaataatcactaccatttctccaaaacctatatttgtgggcctcagcacgattgttcccaacctcaggaacagaatggtaacccctagtgtgcttggggcaaaaattaaggtttagtgttgtcgggtttagagttagaggaccgtcgtggttgttctagaggtctttggcattgtctttgatgaagtagtcgactagggctttgacgtggtcgttgggggagagagggcggtgggtggcgggcgcggtggagtggtggttgggggaaagggtggagcggatgtgggagcgaatgcaagcttggtagagctgcttctcttattggatgagtctgttatgtttgtctctggcgagcttctcgtgcatgcgcttccacttccacttgttcacactgtcgagaaaggttttaggaccattacacatgcttcggagcaaaacccagttccagttgcacgctgccctacacgctttggctcgattggctgtggtgatgttgggtcggatggcgatgatggcacggtggtagtggtttccgttgggaaaagggaagaaggaaatgacatggcaatgacgtgttagtgataaggcttaatgacatgacactatgtctgccacgtcacacttaacaaaaggggactaacgacaggtactacattgaaacataatttttttaggtacttagttggaaaaaatgaatgtttggtagtaatctaaaaacggcctatttccagatatgaaaaacttatttaagcgaaaaataataaagaaataatggatttattttaagttaaatagcctatttagtctatacattcgctcacatttgtttttttcgcaatattgataaacttatgaattaaaattattcattttaaaagtataggaactaaattatcagcaaatacacataaactatttgtccatatttttttatcatttgttgcatgggtgtatctatgacattttattttttttattttgaaactaaattattgtttgtgtacaataaacttcaaatttatttgaagcatttcaactcaatgaaaattcaataaatttcaactaaaatttatgaattatcaacctcacttagttcattattactatatttgctaacttgatatatattgagaaagacctaatatatcttgaggatatgtgcattatgcggataagtctttaaggatacatgcatctcaacttttcatctttatttgtgttggattgtcaatggtcttcggctacaaaaactacaatatcaataacttatggatgaagatgcaatcgtcgaaccctacattccatagcatgttgcttttgtcattgttggccatgtatgccaaattgttcccaaatgtgtcaaagatcaaactctttgttggcaagaactttctaggatatgaaatattaatttagagaaagttggacatgcatgggttgcatctacttttatagacccaaagtcaaacctctatacaaatcataaaaaatcaatgagttcacatatgccaataagatttgttgacaaaccataattagtattttgatttaacaatctcttcgacgtctactattcatataaggaaatgaaatggatttatgactttatgatcttgaagtacattgttgaggatgttgacaaatggaggctcatgataaaaacatcattatgattggaagatgacgaaagacaatgacatcaaactctagaccaacacatatcacaaaaaacttgaagagttaaaggtaggaaaatatttttctcctctataagtttatatcaagagagcgagcgctgcacaacgataaagttgtgtcttaatgactcattggtcatgggttcaaatctggaaacaagcttctgaacaatgaggtaagtaattttagtttttttatataagtttatatcaaagttactaatcaataagtttccataaccatggataaactacagacaacaactgaaatacaaccatacaaacacaaataaatgtcattactaggcttaattgcacatatcataattaaggatacaaacaaaaaaaaatgccaagtgatcgatgaaaaaaaatattggcaagaaatgacaatcctcttaagcctagggtcaacttggttaaaggaggagatgttatcgttgcggttgatttttaggtgaatattgtgaccaatgtgaaaaaaattacagtagactataggggctacccgacatatgtgcacaaacagaaatgtgtttacctactattctcttatagggcatggaaaataacatgtttttatcttagtgattataagattaatctagtttttgggaaaagcaaaagtttttctaaaggggtgaactgatggttgaactagtgatttactaactaaattgtattaactgattgaaagattaaaatcaaaatatgaatatatgtattagtttttgcaattatatcacaaatgattgttatgacgctatggtaagcaagtttgttgatgtatacatggacataggtttgatccctagtatgttcatttttgtatttgtaatatcaaagccatcaataacaacacatgtacacctatgagcaagaccgacaattcggatgcacaacatcgtgacttgggccacacatttataacaaagggagtaaaaaccttgggccatgcacatttagctaagcatatgacataccttgggccatatatggtccactcaagattgaatttcacgagttgaacccaatttcatgatggttttgatgtcgtcgcactggtccaataacatacatgatacaatagttaactcaacccacttattggttcttgaatgactaattggtttgtgtcgtgtttaaaatatatggataaatactctttgtttaatgacttttatgaaaatggaggtactacatggtgtaactttgccttattcttctaaatctaatggaatggatacaagaataatttgaaaccttaaaaaatgatgaatgcgatattaattagttcttattcctttcacaaactttaaggacaaactattatgactacattttttttttacacaaactgggtcaatttttgaaacaactatcatttttttaagaatactattttgaatttttatcaacatgttaaaaatgagatgaaaattgaattatacttacaatcaaaaaattgaataatttaatataattttctttataatcattagtgttattcatcttgcacattttttcatcatgtttattatattttttagtttgaaagttccttatgatttataattttcacgtaagtaaatttattggaactaattttacgtcttgaattagtatattttaaaattatgttaaaaaattgatattaaaaaataaaaaaaatatatatttaaaaaagtaaagtaccaaaacgaattttaataaaataactagaataaaatatagttatgatttatcatttctttccccgaaaaagaggaataaaagggagatttcgggtagcgcagggaagccgataaaagaagaagaagttgcttcttatctgcaacactctgaatccacttcgctggtaataagaggagagagagagagagagcgtggagaatgttaagtctctcagttgcttcaccctcttcttcaaccatttcctttctcccgaagccattcaatggcattcagctccgtcgctctgccacatgctccattccacccacgaaacgcagcgcttcggtgccggtggtgatgatgtctaagaggacggaggaattgaaggaaattagacaaatgaccaccgaacaaattaacgaagaggttgtcgaccttaagggcgagcttgtcatgcttcgccttcagaaatcggctcgcaacgagttcaagtccagcgaattcggtcgcatgcgcaagagggtgcttcatttttgcttcactctttgttcttctttaagttcccttgtcatgattttgattataaactcttttgaactgaaaataagataatctaatcacgttaatagtttttgttgttctgggtaacaagctagccttgggagtttgtgagagaatttagtttgcttttctctgcttttataatgaaattagctagtgtgattagcttgagaatgttttaaactgcggttgcggacatggttttgtcccaatccttgatattgtggacaaatttggccaatgtggccacaattgtggttgtgtagacccaaaaaacccttgacgttgcgggtgcgattttgttgcaatccttgatattgcagatcaatgcagccgatgcagctacaattgcagtttaaaacttactcgagtgttaggtgaaaggctccaatttggtagtatttttagggggtgtttcgctgagcttatgatgagcttacttgagcttctagaaatagcttataactctaataagttgctttgagcttttttcaataaatttcttagagtaacttgttaaaataagctctttttatctttaataagttttatgattaaatttatgacacaagtcctcatatgataagagcttattgagtaaacaactaaacacaattaaattgtttatccaaatgcacccttaagcaatatagctcatgtactcagctaatcatatgttttacttcatgaagtggtaaagggtgagcttggcgtgctctgtgcacaaattatgcatagacaaattaatccactaccttctgcttccttttttttcatgcttcaatatatgtttatatttatgtaaactatttccctccctttatggatttcttttcccattccagccactgtatatgatggcttgataactcagttttgtttggttagattcacatagatcaatccaatctatggtcataaatttgaatctcctactccatactgtctgaactctctgggtctcccaagtgagagggctcacttagaaacaaattgtcatttgttgccgacaactaacctgatcagactaagaccagcaactaatttcatggtaatctgggcttggcacacccacctgctactaatccagaaatgacagctctatgcttggtgattggccaagtaaagaggcctagagatcaacgccctttgatgaattgaatggtccttcaacccctacatttgattccaatttctggtatagatctaaataatgagacctgccaaacttttacttcaaaaataaaattcaagtatgagcatcacatctctctatgctatgagcaggaaaatactgtgagaaatagatatgcatgtgcaaagtaattcaacatgcatgtaggaatacttgaactaggtttttcttttgcttgatcaggtgtttctcttatatgcatgttttttgagttctgctagatgcacttcagtttctttatgaagtagtgtgcaatgtctttaacttctgttcccaggtgtgtccaactccaagcaccttctgatgcttatttggccgggttataaacttataattttgactcaattgagctgtaatggataaatatgccaatctttttctgcatgttagtccttgttttgcaatcattttattttgtttttactcttaaagccaccatctaatcaaacagtgcactgggatcatagtgctttgatagcatgttgaatacaagatgtgcctaatggaaagagcgaagagcatttcaatctggcgatactgatctagcctcatctttatattttattagtgtatttcctttacgtataatttcaaatgatgatgaaatgatactagagggctttactaacaaataagttctttctctagagtcggcgtgatgctgtgcatttcttgtccatatgttaatttttttgggtgcatgataatgtgactgcaaatatccgtacagattgctcgcatgcttactgtgaagcgggaaagagaaattgaggagggtatcaataagaggttgtccagaaagcttgataaaaaatggaagaaaagcattgttgtaagaccacctccatctttaaagaagctccgggaggaagaagcagcagcagaagctgcagaagctgaaaaagctgcatgagcttacacataaatatgcaagttacagagttcaatggttaaagttattgttcagtcataattgtctcgtgtataatagatcttaatcgtagtaacttatgtttgttcctgccagaaggttcattcatgccttttattttgtgactaaagatacatgattatcaaaatcatggttcacatccttcaaattaggtaaaagaaaaattaaattaagaattccaattccattaaaaaattgcttttaatttgttttatgaatgactatcaacttttggagtctcaaagtgacaaaatttatcaatcagaatggggatgcatgtctgtttttgaaagggcaagtgattacgcagagttggtatttcttttaacattatttttcaatcaagtgcctaagttagggtatcgatggcaagattttcaatattcccatggatttcttcagccaataatagaagtcgagttcgaattgactttggaagattttgaaaatttattatagtgattaagcatgatgttctaaaactgagttgagaagaattaattttatttggttagtaaaatagaattgcttttgaagtataaataaaataatttatgtttcacacatgaatgagatgttactgtttcgatttatcgtacggactagaattccgaaatgtttactactttgataaaacgagagagtaaattatattaacttatcattgtagttttagatttttatagatcatacataattttcttatttttttttaaacatttatagcaatatcccatgtagagactagtgcaattttaaataatcatgaggattagtatagaaatacaaaaaaaaatggacgaaacctaggaaatgttactaatattgcaatttaatttaaaaatatttcaaaataatatttaatgtacgggaagacacaacaagtgttgtgttctctctctctatagcttctctttctgtttcatgggttgcaacctatcaagcacggacgtgacaaataccagcagaattgcgtcggacacgatccgacacgcgctgatacggtgtcagacacgtggtcaacatctctgacacgttgaccgtagtccacatgtgaatttgatcgtgtctaaaataaaaaaatatatataaaacccttacttattgagctttcagcctttcatgcagtttgtttctcctccttcacaacactcacgccgttcgctcctccgactgccattcgcgcgcccttcacgtcagtgcgtcaccgttcgagctgttggaaatcaacaatcacacacaaatcgaaaaacagaacagagaataggaaagagagatatgacacagtaatttaccctggttcacccaatgtaggctacgtccaacttgtctgttctataatcacctcaccgccactcgttacaagtcacacggtttacaaggggaatataaataggattaaaagaaaccctaacagcagctattcatgggccctagcccaaactactaataaaagtaaaatattacacaacagtacctagcctagttggctttctgctgaccccgccaacaagaagggttgtcatctgactgcaaaagatgagccatatccaacacgagccgccactcgtgtcaccgttcattgcatcaccatcaatcgcgccgccgcttgcgtctcctctctgctcgcacctcgccgctgtgactcatctccttcaacttctcacgaggcaccgctatctcactcctgggggtaaggtaagtgctgcgggtctgggcgactgggcctttgtgggtggctaagtgctttttttaattgattagtttttgtaggttttttttataaaaaaatatcatttatggactacaatattttataataccttgcttgtgtaataccttgtttatgtatgggttgtgttatttgaaacctcatttttatttttttaatacctgatatttttattttttttaatacatggtaaatgataatttgtgcctaacttgtgttatttttatttttttaatatatgataaatgataatttgtgtctagcttgtgctatttttatttttttaatacctgacaaatgataatctgtgcctagcttgaacaagtgaattagtgaatcttgtagcttgacttgtactattttcatttttatttttttaatattgaatattctgttttgtagaatgaaatgcagtctctataaatttttttggattatatttatggatatcattagtttagtttaatattttttaaattattaaattttaaatgaaatatatattatataaattaaaaatattatttaatattaaaatgtgtcctatattaaaatttatatacttttttttttaagatttatcaagtatcgcgtggatgtctgtgctagctgcaacacaaccaacaagtttaaaaaggagatgcaaggagaacatgacacgttctgcgggtcaaaagataatcttgatcggtcaatggtgaaaacagacccaagcctataaactgtaaagtgttttgtaacagtttcactttcatgttgttataaaaaagaccaaatgatgaatgagccgtgagttctgttccgccagggttttgaaagagctatcagtgtaagatggcgatggtgctccctgaggagctgatagtggagattctgtcatgggttccggtgaagcctctgatgcgtttcaggtgcgtttctaagacttggaattcccttatcttccaccccaccttcgtcaaattgcaccttcaaaggttatccacaaacgcccacgtcctgttaacgccggaagaagaagaagaagatcccgaagatgatgaaaaagaaactgacggtcttgaaatactttacgttgtttgcttgaggagaatccacacccgctccttttgatgatcattaccaattcaatgacgtttactctttcatagcttcctgcaatgggtttattggcttgcgttaatttactgttagaggtagaggtaattttgaatactgggtacgattttgaaggatcctgtcccaagagtcgccacacttacgtatacgtcgacgcgattatatacttttagaggattatgtgaagtttgggtttggttacgatgattggcgtgacacttacaggtggtggcactctgtttcaatactaaatcacagaattgggaggtgagacttcactgcatgggcgacacttgctggagaaacattttaacttgccctgcttttcccattagtcggaggttactcaacggacatcttgtcggtggtaacgttaactggttagcatttcgcatgttgggtattgattatgaatggaacactgttactgtcaatcaattagtaattttttcgtatgatctaaataaggagacatataaatatttgtccatgcctgatggtctgtctgaagttcctgattatcctcttaaggttggggctttgaggggttgcctgtgtctttcgtacactcataggagaagaagccatttcgttgtttggctaatgagggaatttggagttgagaaatcctggactcagttgttgaatataagttatcagaatcttcaaatctctccaactcatgaattagatttattgctgaccacgcctttgtgcatctctgaaagtgatgatatgatgatgcttccaaactgcatatatgatgaatttgttctctataatcgaagagataatagaatagacagtattggaaatttcgacggcaaagtgccaatgtgctcctatggttagttccaagcttggttttgccatattgtaagctacctgcacttgcttgtatgaatgtattttaaattatgttaatggtttcagaaccttagccatttaatgtatggacatgacagagagcgtgaatacttttggtgtttccttagtttgattactttgttggatgattctattggcgattgctaattgtgtgtctgctttgtttttggatgcattttctttcctggttgataccttgttaccaatctcctgaactccttcattttctattgtagtagaatcttattttccacggaaaggattagaatatcaaaaaaatttagcaatggcatctcatctcatgtatacatgctttggtttcacctcttttttcagtcctgaccatcaaagttgtacccttccaatatgtaattgtttttttaatcctatgactgttttatttgggaaagtaacttctgctacagtctcattccccaatctaacaagattattttcaaattataaatctgcaacctcagcttcaataactttgtgccttttcaggccatgtggagagatagtggaaagaagaaggtggtgtattgtagctatgatttaagattagttatagcttccttttttgattactacttaacagttatgttgttttaaaacttcactcatagtgtaatggtaagcagaaacacttgcctcttagcaagtaatctaggtgtagttcttgtaatattttctgggtctaggaaatggtaagcagtgacttgccttttaaatgccctggtaggatctgatgatacagataaaaaatccaaattgatgaaaacctggttcaccctacagcagaaaatttaatggaagttatgtttagctttgaggataattggtctgtcggttaagtcatgatgtctacgggaaaaacagtgttaccaaattgaaattttaagctttcaatgataagcatcgagaggcattggaggtgtttggagaaacgatgagaattggtgtggttccaaatgaatcttccttcaccagtgctttgaattcttgttgtggattggaggatcttgagaggaggaaagtgatccattcttcagcggttaagatgggtttagaaagtagtgtatatgtgggatgttcccttgttgtcatgtatagtaaatgtggttatatcagtgatgcagtgtctgtgtttaaggtgattaatgagagaagtgttgtttcctgaaaattggttgtgcacggcatggatatggcatgtgggctgtacactctttaaccaaatgttgcgtgaaagagttgatccggattgaatcacatgaatggtgatacattgtttattcatgcatagtgtctgtgataatttattccaccggtgggcatcataattcttaaaaaactgtggaaggaaaaatactatgaatggaagtgacaatatttgtttgctctgcactgcagatccttgataacaaaggatgaagagaaaacttccgtattacattgattgccgttagtaatttgttcaacaaagagataagattattagttacagtgggttggtacaattttcttgcactaataatctatgatgcgatgtttaatctcatttttatttgaagttaagttagacagcccaatcttcctttgttacattttaattctctactttttaattaattccttaattcttttctaattaatgcactatatattactgtttacaaatccatccacacattctcattttgttgcctacattctcaaccccgttggttggaacagagaacttgcctaaaatcatttagccatcatcttaacgctttgaaatgaaattgatgtatcacctgaggtatattcaagagaatcaaagttccatgaaagttactttttttagctatgtttatgataacattcttgcgaatcttttaaatataccagacacatttgtaacattctcagaaattatgatttttaagaaacatgattcttgataaacaatttttagaaatgaaaaaaggttctaattatcagaggctccattgaaaaccaataatgagacaaagagtacaagcaaaggtggaccttatcgtactaccatgataatcaagtactaaataaaaacatgatggaaatgtaagaataaacaaggactaaaatataaataattttgtactaagtgatttttttttaataaaaaaaacattggaacgaaagtaatccgtacttataatttcacgaaataactaaaattactcactgtttgcctataaagctaaatttaaaatctatttttttaaataaaaaaaaaacacattcgtctttatttttttggaagggacacaatttatcaaattttaaatattctttgttttttgttgtcaccatgacattgatgcagagttttcacccattttgctaatgattaaaatttaataaatttttccttttaatcattttttttccatttacaaaattcaaatatgagatcttgtttaagagagtcgagtccataatgaacaacttattattggttaaatattcttctatcaattattatcaaacttaaaaaaagttagttttttaaatttttacttaaaaaatgttaaaacaagttaatatttttaaaatttagctaattattatctaaattaaattgtgtaacagcccaaagcagcccagcaagaaaagttggcacacttgtccgcctccaaaaacaaaaagacgcacaactacacacagtccacactctacagtacccttgaacgccacatgcgcgagcgcgaatgtgtgagctacctggttggttagcttctttattgcctattcatccacaccgaaggaacccagatcttaaataactcaaatctctattcatccatcactttgatgattgatcaatccatttccttccaattaggtcaactcaaccagtaaaagaccaatggaggaggtggagaaacagaagaagcacttagcaatgcttgaacgcctttccaaacgcacccaaatccgttcacaaaaccccgaatcttcatcacaatcctccacttcctccatactttcacgcttctcccatctaaaaacctccatagagtcccaactcgcccaatcccaatccatttcctcagacccttccaacctcaaactccacttcaatcaaatctcccaatcaatctccgatttagaaaaacttgtcgctgaaaactcctactccctaccctcctacgacgtcagaacctccctcaaaaccgtctccgacttaaaacactccctcgacgacctcacttcccaacttctccccaaaaagaaattctcattcaaaaataaacccaccaccaccatcaagaaggacgacaatgacaaggattgcgctattccaatacctaaacaaccccctcaactctccacgggccttgcgccgcgtgactcgccggggtttcgaaacaaaaccggtgagcttttgattgccgacttcagggattccgaagttggggaattcaccgtttcggatctcgattcctgccaagtgaggataataggttctgtgagggcgcttttcgttcacaggttgaagaattctagggtttacgtgggccccgtgaccgggtccgttctcattgaggaagcggagggttgcgtgtttgcgttggcgtcgcatcagattcggattcacggtgccaaaagaagcgatttctaccttagggttaggagcaggcccataattgaggactgtaacggcgtcaggtttgcgccgtattgcttgagatatgaagggattgaggaggatcttcgtggtgccggtcttgacgccgagaccggaaattggagcaatgtggatgatttccggtggctgcgcgcggtgcagtctccgaattggtcggttttgccggagaatgagagggttgggactgttgagatatccaatttgaaaaatggggacgaggagatttgatttgagtctcaacattgtttccttctttgtttcttttatgtgtgattgggctgttactagtctaggtatgttctgcttcaggaaaatgatgttgagaacttgagattaatgcgattttggtaatacaaatggttttggatatgttcattttcagtgtaggaatgagttttccgtgtgttgcttccatgagaacttgagcaatatgttatcttttctattgttgcatggattttgatggtctgcatttaccctggttcgggaatcgtttggttattgatttaattgtttgcttttcgaattcattggtcataaacatttggaatgtttcatctagggagctactatattgctgaagtcatttctcttataattatggaatgccacattgtttgtggatgtgttatgtttgttttaggcatggcaatggcttgtcttttagattacataaatttgttgatccttgaattgcaaggtgcatgttcttattgtgcttcaaatgatttatcagttactcgagccagttgatccattgtttccatttttatttatccccttgaaccagttgggtaattgcaatttaagaaatatgggaagtgaagttctactgggaatgcctccaaaactgacatatttattaatttcttttaataactagcttgcataaaactacatgctggacatgcaccaaaaaaattacatgctggaatttctgtgctattaattcgtgacgtggatacaggtaatttaaaaaattctgtaaggagtgttcttcactggatatcagtgaagcgtttgaaacattctgtgcctagtgcctactgatttcaacatgtcatgtgggagaagcttctatgcatcattagatatgaactgcttgattgacctgttaaaattagaataagtagttctccctatggcaaaaaaatatcccgattcatgagaaagcctcagatatgtgctgcatcaaataaccccagttcaatcggctgcaatcatcaagacatcaacaattgcgagagggaaaaaagaaaagaaaagaaaagatccgattagtattagaagcgaaagacgatcttttgaattttgatcaaggtacaaaacaacactttgaatcaagaggaggggatctcaggggggttttattgcacaggatttataggactgtgtgatcacaccctaatctagagtaccataggctcaacgaatcatcatgtgcaccacttgtttaaaaatgaatagtatcaattgcgaaaattgtaaagctagagtctttttgattgaggcattgtgccatcacgtctcaaggagatagaggcttctgatataattcaaccgtaacaatcttcctcaaaagttagtttaacagatagattagaatctgacagtaaataaagctgaaattagattgactcgttaaaaaaagggatatagtgatatacaacacacgtaagattttatgttaattgaacattgtcaatagttgaaaccttaactgaaaaattatcaagcagagtaacagacttatttatttaagaacaaaaactattgaaaatatctaatggggaagagatatgagaggtaataccagaatcttaaacaccatctgtgaggattgtggtggaaattatacgtagtaggatgaaaagaatgcttatacccatcgatagataatgggaattccatttaatattggaaagatattgaggttcgagccgcttgaaactgcagcgcagcttgttaagccttacggaatatatagatcctggccaattttatctaaggtgaaaaggcttgagctacacttgcaatttaaggttataactattaaattatttaattgtaaaacatataagccgtcttagctcagtggtagagcgcgtggcttttaaccacgtggtcgtgggttcgatccccacagacggcgatttttattctttttactattaagttttcaccataactttatccagcattttaaatttattttcatatggatttccaaataaatttttatttcataaatattaaaataaattgaccaaatgtaaaatataataaattgagtcataatcaatcgttcaaaatgaaattacataattatatagaacaacaaaaaatcacgtatgtatttcaaaaaacaaatcacgtatgcaccataacaattaaattagacacctctaataaaaaatacagtacattacatagtacaaaccatgcatagttaaattagtcatgcaccatcaatattgaaaacttataatctaacataactaaaaaataaccaaaacgaaaattatgaagatttgaacaatgtcttagaagtgatggatgtcacaatagcaggttgcaacaccagagtagatggcctaactggtttttgaacctctaaaaatagagaaatcgaatgtagatacggtactcaacaaagtagcattagcctccatgtccatgttacacgcgtttttggttgcctgttgaagacatgcgttttttttttttgtgtgtgtttttctttttcttttcattttcacgtcaaacagatgaattttttttgcagaggttgttcctccgtttatagaaagagagaccaaatgtatcctccattaagatcattctgtgcaaattgaggaaaatcacactaagcgtgataaaaacacaataattactattaatttttaatatcctattaaaacaattgatttttggatcactatctattagtgtaaagtatttacttacttttgctaatgattaatcattattgaagaattaaacttattaattttatagttgttaatgattattatttttttggataacatacaagaatcattttattctaccaaaatcatgatgagatcatgaaaaaaattaaatattatttgttgctttacaattaacatggaaatttaattaattattttcattgttaatctaatccaaacacattattaatgcaagttttctttccaatcactcaaaacaattgataaaaaatatactttacgttatcttttaactttttttttgtctgatcagatgtatttaaaaaaaatatttgacatccaactaatcatgtttaattgggtcaacctaattttaggataaaatgttatctctagttgtaattttatattcaaaccgatgattaaatcccagactttaattaaaaaattaaaatatcaaaccagttatgacaaggattatcttgtaaccttttacaattgtatagtattcctaatttgacttatttacgttctcaaaatctctaagttgttacacagacgtgatgttcttccattgatattactaatggattaattcttaaattacattaacaatgttttgtcacctgaaatggtaatattgaattattgatagtattagcttttttaaaaaaatatatacacaaaagtagtcttcgaaaaagtattatttaataattcagataactatattgattaaaaaagtataaaaattataatatgccttttatcaaaatattttttcaattttcaaaatataaatacttcgcataccaaatatatatatgttatgacgtcaggcattctcaaatctcaagtagtacaccaaaaagaaaaagaaaaagaaattccgaagtaaagtcctaaagggcggacagtggaagcccacgaccgccaatttaatataattggctgtttgatgcttttgattttcaaatttcaggtcgtgatttcattcagaagttagaaagttgaaactagaaaaggaatcaagctcgtataggaaaataattagacttcaaaattgacaaagtaaaataaaaatacaaaatactaccattgatatattatgtatgtagtacgtgtttggatttctgtccgtgaaaataagacgagctccatcaatgcaacaaataatttgttttagtgcgttttaacatagaaaatagttcagaagtttatcacaaataaaaattcaaaaacacattaacattaacattgtgtttgataaagatgaatgaaaaaaataaaagtgtgagtgagacatgaaaaaagataaaagtgagattgttcggtataaatgaaaaagagagttgaaaattgaaaagggattaaaatttcgatttaaagtggttaggtagaaaataaaagaaaacaaatttaaaattaaacaagtgtgaaattcatatttgtaaaactttggatatggttatttgactggtcgaggtaataggttaatgagtaagtggttcaatcggactggtagatcaatagttgatttggtttgatccaatatatattaaaaatttaaaattatatatttattatatataaatatataactaacattatttgagtaagaaaaatttatccatatccaaaataacaattaataataatccaaaattcaaattttatttaaaaaaattccaaaattatttatttatttttaaattaaatcatggtaaggttgaactggtccaattgggattcgataagttgcccagtcaggtttgaccaagtcaattacatgatcgatccaatagtgaaactaacccagttaagtcaccatgttccggtccgacaggttcgatcggtcatgctagattaggttcaacaacccagatgaaatttcctttttagttggtcctaattatttgataattttttaaaattaaaaggaatataattgattatgcctcattttttttatataaattgaatggacataatcgattatgttaaccataaccatatcgattatgtgcttgttaatttaaaaaaaaaagttttaagttgcatttgaaatgtgcttccgaaagttttcacaggtctcagtgactatcactagtctcacaagcatgtaatgaagggcaatgttagaatgttaatatttacaatacattacagttttccaattgctttcacctcattttaaagatgaaaatattttgagtggaccccatatctcttggcctactttctgctgagctttcagcttcatcatccaaacgacacaattgaaaagctttcaactcatttcactgatgatcagcttttagttgctagctttcatacgtctcaacacaagctgtaaatgagtgaaactgaattgagtatttaaagtttaggtttgatttgtaaaaaaatgaattatttaatattttatttaaatgagtctatctaaagtttgagtttataacttaatcatcagttgtctatgttttatcaatgaaatgccttatacattgtgaatcaattaaaattcatttcaagtataatttttaaaactcaacaatcatatcatatataataatttgtgaatggatgattataattttttatgctaattttatattctaattaaattcttaaaaatataaatatataaaaatacttgccacttaactaacacataagtatattaaaaaataccaacaatatactcatttaccgtgttaagtgttaacagttccatcttcatttagaaaaagaaaaagaaaacagttccatcttaaaaatatatccgcctttgtatacgcattatgcatacatgcagcacttccattaatttacttttattggacatttaatatttatttaagaaaaaagcaagtgtttttagcatttctattttggattacatctatctatagagagtttaattcaattgattgaataaagtgtatgaattatgggaaactttatgatattctttgattcttactaataaaaaatgtaaatgaatacatgcacctaatatttgtttaaatgaagaaaaaaatacatcgtaaaggagtaagaaacatacctaataaggcaaaagttggccgtcagttatgaccaaatctcctcgaagaagtaagggagtaagagagtcttcaacttgattttgatcattgaggtttcgttcataatataatattgcagaaatctgggtgcacattgtcgagcttaagcttaattttaatcaaattatacgttaccattaactttttaaaatgtaaccactttacaattattggttttttgatggtggtttggatacttttttctaaatttgaaatttcattgcacgattcatgcatcaaattaacataggagtgacagtaatcatttctacgtactattgtttattttttactctgtcaaaaaaatcgttttaatttaataataatatttatatatattattgatgtaaaaaaaattatattaccaatgaacaaaatttatgataatattatagaatttaataaatttactataaataatttaataaccatttactatagtgtgtcagactataatttagttgtcatatcattgatacactatcatatcgtgtgacgctaatgaaggagtgccaaagtgaagacaatcgcctaattgatacatctgactggaagatcaaacttgcacaattagaatttaaaaaaccaaaattttagaattatgatataactgagagatcaaatacatatacaatgaagcctaaaattaaaataaaatactaaagtcattttacttaacagaatccatataaatttcatacaataatacaaaaaatatattaaaaacatatactccatttttattcatttggatttggatttggattataagaaaaaatgatttgctatacgaaatataacataaaagaccgcgtgtgttcctgatgggcgatggcatggataagatccaactagaaagacaaatatatattagcgaatgcgctacgaaaaatttgatgcacagaatttattgatgaatgtgctacgagaacatgttgaattccaagcttgaattcttaacgcgttccagggcatgaaggatattttggtacacagcttagaaaatatacattatattatcttgtattagcaaaaagtctgaaaaatactgtaaaaacaaattaaagtctggagaattgaactaatcaggaaaagaaaaaatagaattcacggttaagaattaataattcagatatggttgcgggcgctggcagaataggattgaattgaaaggtcgattgtcttttaaggatacgttctattatgaaaacattttattaattaaattcgaataaaaaatattcgtgtgcatataaaatttaattagaatatattagtaatatacattttttaatgttatttagtcataaattattatataatcaaggaaatattgatttaatatttactttaaaagttataattagaatgaggtgtaattaattatttaattaataatgtaaaaatctttacagtaacgcaatatatcaaaactaaactctattttctctctctctatatatttaaacaaaaaaaatctctctctgtatgtaatacacgtagattttttataataaacttataaatgaataacttatatttttttttatcagagtatcctcctataaattattattaatacaaaatcaatcctactaccaattcccaaaactaacttgcaaatgaattagttgacacacacatatggagagaagaaggaccaattcagttcaagctgattaacaaagaatactgtataattgtttaataatacaaaatcgttactactactaaaagtctaaaactaacttgcaaaaatttattttttatatttattttacttatttaacatagatttattgacgtgtgcctgtatagacacatacacgaagaaagatcaacttatatactttataaaaattgatattatttgtcttctgtataaatgttgtagactattttcttgttctcactgaaaaacaaaaattggatccaccactgtatatcgcgttgtaatttgcaagcatgaataaaaagatatagatgaagtcatgaacaaaataatattgtaaatttttaatgaagtaacgagccatctatatttgtatctcaacatgatcgatagcactatgtatatagtttaccaacagaaattgggtttcgcggaaagaattggtctcctacaatataattgaatcaagatttccaattctcactaaaaaaaatctctacttttctaatgataatcttaactactttttttaataatgtatatctttttaatttggtgtatttaaatatgacgtgttaaatttatgtctgtggaataattgctacatgtaccgattcagaaatttgaataatattttgtgtatactcatgcatatttacacttaaagtatggaagacatgaaaagtgagaggaagcaagtggatggagtaatgtaatcaatatttccttctatcgtttggcttctataattaaaagatcaagttattcttatatatctttacatatttcgcgtttttcttaggaatatttatgtcactttatacacattttaactttctttccttccatcttttatactaaacaatttacaaagttaaatcatttttcacactttttctttatttttctttttttccccttctaatttactttattttctttcctacaccaaacaatatcagagataaagaaataaaaaaagagaaaataataatataataagtaatacgataagaaaaagagagataaaaaagttattttataatattagaattgaaaattcagaaacatccattcccattttgggatgattttttttttcttgacagtggagaatgatactaaggggatggtgtcctgtccgaggtacatttacttcactctaaggatataagtagagatttgaacttgagacctaacagatacgagctaattaaaccttattttgctccactaaatccatcaatctcataagttttcttttgagttaaatgtgattttgatctttttatttttttaaatctataaatttttttcttttattttaaactatagatatttgtttacatgtttttaaaattttcaattttgattatcctattttaaaaggagacatttaatctcccaaattagtaatatctattattttagtgtttatgtcaaacttaaagtgttgatggtaaagaaattagtgttgattatgatgtgaaataaacaaataatcttatgttattttattaaatttggaccatattggttaattttttattactcaatattttgaatttgatgaaaagattaaaatcatgaattttacaaaattgaaagactaagtctctaatttaaaataagggactaaaattataatttttgaaaaatatgaggagtaaatgttttatgttcaaataaaagaaaaataaaaatttatatttaaaaataaaagactaaattatggggtgtactgaggaaaaagagaaagatatgaggtaagaaaaaaagatacatagaaaaagtgatatatatgacaaaaacagtaaagaaatacgaattaaaagagttacaagagtggaatatttattttagtatacaataattgtacaatgattaaaatttataatcttatacatactatccaaatatttcacctcaagaccaaatctcgtggattagagagtaaaatgtttatctataaaaaatgattattgtataataaaatgtacaattcaggagtttaaaatgtaataaatgataaattgtagggggtgagataaatacttagtgttgtataatttttatttataatgattctgatatcttgcaatcctgtatgtttttccttcaaaatttccaacgacactcacataaaatttattaaataaaaatacaaaaaaaaaatgacattaccatgacttttcgtgtaacaactaataataataaaatactagtagtaattaaaatgaagtcaaaaaagttgcaagactggtgctgttttgttttgtgtcaattgacataaggtaatcaacacgtgctgcatgtatcgacaaaagcaactttcccttatattttcaagtttgtacaacaattacgattcacagtttttttttaacttatttgttaaaataaatatttgtttttatttttaatgtatttatctaaattatttttgtttaaaaaagaattgtttaatttttctttaaaaaatacttatataaaaaatatttattttaaaattattaagctcaccccatatcatagcatatataagtagtatatatttgctggatcatcttactcatgaaatcaacaagaagaacttagctaaatacatacagaatacagattaataacccgctctaattcaaccacatgccaaacaccactgaagaattccataacaataacagcttcgagtccttccatgtttcccttcgcaacctctcccaacttaccacccgaatggattcccttcaaagcttcctctcccattccatccaatcccacactctcctcactcaccaccaaatgaacatagtctccaacgagatcctaaccgccattcgccacgttatcaccaacggcgccgccctcgtcgccgcctcggtaaacgtgcttcctctctcggagactccaacgttggactctccgaacctcaacaacaacaacgacaacgacaacgtggtggagctcgacgcgatggagctgctggcgaagcaccttcacttctgcgaggtgtgcgggaaaggcttcacgcgcgaagcgaatctgagaatgcacatgcgcgcgcacggggacgagttcaagaccccggaggcactcgcgaacaaggcaagtggggagacacgcctcaaggggtcgcggttttcgtgcccgttcgagggatgcaaccgtaacaagacgcacaagaagttcaggcctttgaagtcggtgttctgtctgaggaatcacttcaagaggagccactgtcccaaaacgctgtcgtgccagcggtgtcggaagaagagcttcgcggtgcggtcggacttgaggagccacgtcaagcagtgtcggggagaggccacgtggaagtgctcgtgcgggaccacgttttcgaggaaggacaagctgttcggacacgtgtcgctgttcgaggggcattcaccgatgcttgaagaggagagcccagtggcggtggcggtgaaggaaagtgagggtggtttggatgggttacctgaagggttctttgatggtttggatgaatttggatttggatccattcaaaacaactgttcacatgcaggaggaagcttggccttcgggcttccctcaaattgtttagatgcatgggaactctctttttctaatttaatctaaaacctaaataatcaaattcatcgttcaaagtgtgattaattgattcttaaaaatgaaaatataaatttaatttttaaattattaaatttgtgataaaattagtttgtgttaaatttatgagataattttattattaaattataatgtttaagaattaatttaataataaattatagtttttaaagatcaatttaatattaagatcaattaatttgacaattttctatatatttaaaaattaaatttaaattttttattattaaaaaactaacttattagtgtctttcactttttatgttatactaggaaaaacatttaattgttaacttttaatacaagagtttaatttcatgcaaatatttgaagtatgacttttaaataaatattaaaaaatgagcgctaactatgcaacacaaagacataacctttttaacatatatactttctacaattgattaattttttcagaaattataaaatagtaacaatctgatcaactcatatctgcaagggtgaattcaaaatttcattactaagaattttgtagattatttgtaagtattttttattcttgaagtcggtcttaattatgacgaatcaagatttaattcattttaatttttaacacctgaatagaatatattagattgttagcattttacttattggggaagtcaacaatatatataaccatacttaagtacatgatgtatttatattagatctaaaatgacttaaatatggttgacaaaaaagacaacaagattttatactttttgagattaaattttcgaatcttataatataattagaaaactaataagtattttgtggacaaattatcataagttattttcataaatttttcaaattggttgttaaaaggtccacctaatattgttttgtttaaaaaataaatgaattaatcacacttaaaataatataaatgaataagaacataacacttaatcttaatatgtttaaaacactcattacacgatttttatttttttttaagaagatcttctttatttctgtacaaacaactccataactatggaatggattaactaatgatgaattacttgaataatttattatttatagactttgataagctgtatcataatcaagtaaatttgtaaaaaaggaaataattgataggaaccttctatatgtatttgaattaatttgtgaaacttttgcatatattaggagataatttaggagctaaataatataataaaattatatatatttcagtgcagcatatgaataaaaggtagaaatttatcttaattatactcttattagttcacatattttaccttagaagttatttcaatctttctaactttacttactcatatttaattttttaactatttaattaagctctccccttaaaagttttaatcaacaattagtataaatataacaaaaatgtggatatcactaatttatataaagtgacaaagagaaaatatataaataaataaataatgttatgaaaacaatatgtgaggtgcagaatacattaattatagtctgggttttattcacaacttcataaacgccacttgttctatcctacatatttcaatttacatttacatattacatatgttaaactttgaaacatggcagcgtccgaaaggcacacatcaatggtccagttttctatttttcttgttcagaggaacttagtcctcatcctgcaacacaccagtatcactatcaataatgcatgtgaaatccattaaaaaaaaaaaaaaacaatttcatttgttatcgcagcactcttgattttggagtgcgttttgttgcccctgctgccatatctcaaaccccggtgtcatgtcagctttcaaaattgaataagagcatctttgaaaatcatatggaaaataacttacgtaaaaggactttttgcataaaaggattagaatttttatttttgcttttattcattaaaattgcattggaatatacatagtaacaatttcaagtataaacaaatcatatattaacgcttttggaggctatgccaccttcaatccaattttaacccttttatttcgaatatttgtatttggatacctataaatttcaaacattttatcatcactttttatttttttattacattcttcttatcacactatatcattaattaaatcaattatttatcttttgatctctttcaaagtgtaaacttctaagagagttttcaagaatatttttcttttatttcagaagtgtagtgtatgggtagctagcccctagttattatattatatgggatagagatgcataaaaatattatatgggacactttatgagttgaagactgaattaacagctctatctatatcataaaataagttcaaactcatcatatataatatataaattttaggtgtcaaataaaacgtgagtcttgatgcatcattattgttgactaatgccagaaaagtgatggtaacaaaaggatgtgatggtgtgctgacggccacgaaacggagggtatagaacgcgctaatatatgatggtgtgctgacgcggattggaatttggaaggtacagaacgctgtcgtaacttttgcacgaaatagagtgagagaattcataacaaaaataacatttagacacgcaaaatcataattgacacctagtggaaaataaaagaaatatatatatatatatatatatattattgtgtatatatatatataatcaagaatatgatataataaaaaaataaaagaaaaataataaatgttacttagatgtttgaaaaaatagaatatttcaaaaccattgttgaattcacaaactaaataaccaatttatttttttatcaataaatattaattattaaaatattaattttattagtagaaaaaatctaacatgtgaatcttttcttccttctctttccccttaatcattcaattcatattatatcttactctcataatccacttgtgtagtttgggaattgaaaaatgtttttgaaatattttgagatatctaatttcttcaactacttcattaacactcatcaattatttatagatattttttctatcgtattatatcacttataatacttatatttttgtttcttttatctcttttaattgtcaaaggttgttgagtgttaaaaatcattttgctttcaaaaacattgtcatatatacggcctcactattcccatttccaacacgaggttatctgatttaggaaacgatatagttgtgagcttgtagtgtatatatcactaacgcacacaaacgaaaataagtttagacattaattcagagttccgtattataaattattcccaatggcaatagtgttacactctcgagacattcatgataggtacttatccctcaaactcgacgttcagatgtcaaattcacctttgaagaatagtctcgagatgtaaaattgaggtcaggaatggagctaattaatttgcaccgctacctgcctcaattatccatatatgtcatgtgactcatcagcataatcaaacttgaagcttgatctccaagcaatattccgcacccgattgcattttatacaaccacgtgaaatgtattgagggcacaaagtgctctacctatatctttataaattgttgtgcacaaacttcacatcacatcactacatatgcttagtaaacaacaacaaattgtttctaggtacgttgtgttgtgcagtgaaaatgttgatttctttaaggctttgacgatgacagtcgcaagtaatgtccaatttgccatggatattgaagaatgggaacctagagattcggagcagaatccaccacccgatttgctaactcaagaatattacaacgaagaatactttgtcacttcacaaatcatcaagaaaaggtagataggactggggaaacgaggaaacgaaaatgcatgagactagaactcaggaaagaaaatagatttataaataaaataaaatatgcagtatttacatacaaaagtattagttattggagaaaaatcaatatacttttaatgtcgaattggaattaactaggatagaaacacttgtaacatcatgcgtgatcatgagtgatatgcgtaggtgtttcacgtcctagtaggcagaagcattaatgttaataatttgaggtataatatatttattgggagacaaggatggcaatggcacttagggacaaggccaattatggggacccaaaatattctggtactggttagacgagctatatatccctgttgagaaatggaaacgaatggcaggcttttctttctttcattggcaacattaagtattgaattcttgtattcaaaataatgattttgatacccacaaattgtgacacaagtagtcagtggcttgggtccttttagcaatggtctgcagattgattcctgatcttgtgaatagaatacttactattttgctattcccatctcagggtaggcagctgtgaaaattcgagtgaagataggtttaatcaattgtggtagctaggtttgtgtcttcacgagccattaagaaaaatggtaagaaaaatcaaatgaaaaccactcagaaaaatggtagattcacttaaaatatataggatatggagccaattattttaccatcttctttgctttagctaaggtacctagctgaccttgaactagattccaagaacacagtttatgtttcagaaaggccaactaaaatttacaccactttgcacatcttgtccagcgtcccaggttttattattcctgatacagcaatactttaatatttgagttttagcaaatatacgctgaaaaaagttttatgcccacctactagaaaaatctactaccgcatcaggaatattttgggattcagacagcatccaaccttaaagtgccaaatcattgtttgacaagtcgcaagtgttgtaaattctaattgataggtaccccgtaatgggatcagatcacagctgaaatctcaacaaacagatttttaaaataaattcctgatttatccacacaaaaaagagaagaaaaaaacacgttggaacatcaaaattttacaactatttcccccttttttacagtttttacagttggaaaacaaggaaaattacatttctagatcctctcataatttaataatttatagatcctctcatctcccaccagacaactcaatggcatcttgattatagaccgaatcttctccccaatcaaatcttctttgtaatctctcgtattcttgcctccgattgacctccacatgctgccattcctcccacctttcagccaacccttctccttctagcattcttacaacctcggacattggtggacggtcctctggtgttgcttgcgtacagagtaatgcaacttgtatcatcatttctacctcttgtatgttgtaatttttatttaggttgcggtcaacaattgcatctagtcttttctcccgttctaatttcttaacctgtagagcacaaaaatacaggcaaaaacagtaaccaataattataaaccgataaatcacgtcaaacaaaaaaaaaaagtataaaccgataaatggtagattttggattttgaataataacacaagtaccattaacgcagaggcagaactctataaaacactgcagttcacctttttctttatcaatattatcatataaacaacacacgtcaacttatttccagcttaataaaaatgcagaggtacaggtataactacatgaacttccttggctcactgcaaccattgctcctgtcaagaggggttaggatactctttaggtggagcaactatgacgggctgatccttattttatgtgatgaaataccaaaagtgaaaagtgatatcaccattcaccaaaccacccaagagggacacacaagttctaagcatgctatacaaacaagaaacagaccaaaaaacacaatcaaacaaagaggctatgatgttagaaagagatcttacatggtcaagtaacagcacatcatcttcctcttctaaacgtgaaaagtcaattgctcgttgacctgtaacaagctccaaaagcataatcccataaccaaaaacatcagtcctttctgaagactttccagtggacaaatattctggagctatgtggcccattgtcccacgaacttgagttgtcacattagtttttcgaacatcgactaactttgccaagccaaaatcaccaaccaccgcttcaaaatcttcatctagtaatacattagctgccttcacatcccgatgaataatcttaggattgcaatgctcatgaagatattctaagccacgggctgttcccagcgccactcgttttcttgtaggccagtccagaacaggttcaccaggtttgagttctgcatcagtattagtaaaacatcactggaaagatgccagattttacatgcaaataagatatggaagtccaacctacccaaacatgttaaacaaagtatacaaaaatcatatctataatgttagtcatttaatatccatgttaatttaggcttatgatattatgatggcggtgttggtgatgaaacacttctgactcaacattcacaagtaatttaaaacaaaagaattttcttttgaacagatcaccctgacaggttgaaccactaaaagcaccccatacattagaaggttgaacagtcaaactaccctggcattcacaaaacaagtgaaaagcagcaaaaaaaagagagaactagattggtttacaaaaccagttctgcaaaactaaaatttggacttggttggaccagaagtcaagtcaggataaggttttggttctcaacgttttctcaatggtttgtggattttcagttgaatttaaaaccatacaaataaatagaggaaaaataaaataaggttatctaattctttgatgttattctttcctgtcattttgaagcttccattagctgataatctacatgcatacatatatgcacttttgtatatattattatatatattatataatttatctaattaagttcaaatgtatttatgaattgcctggttcaaccaccaaaatacccttttatctacttctctagttaaacaattcttcaaatcattgctccaaggtgttgaataaatactaaaaatcgttggcatatatcctaaaatgtgtagtttaaatatgtgaaaactttcttcagccaattaatctctatccagttccggttacaaaataaacaatactttctattttgtagcaaatcaaattgaatacttagcataccagcgatgccaaaatgcattgtaagtttgtaacatattacctcgaagacgataggctacacttaagttttgcataaagggataaactaagaggcgctcagttggggtagtacaaaacccaatcagccgtaacaggttcctatgcacagctacacttatcatctcaacctcacgctggaaagctgcatctcccccaggactttcataatcagttaaccttttgacagcaacttttgtgttatcagaaagaacacctttataaacctttccaaagcctccctgtcctaaaacatttttctcactgaagttgtctgtagctatctgtagttctctccatgcaaatcttcttagttggccaaatgcaattcgccgatcaacttcacctgatgaaacaagaaaaaaagaataatgataaaatagtaatttatagttagcaatgactattttaaaaaggaggaagttcacatttatctcaattttaatgtagctagctattacattatttcaacaagcattcacaattaaaagattacagaatacgttcaaccagtaaattctcttctatcaatccaaaatttgattatatcccacattcattggaaatggaaggtttagagtaatagagatacacagatttattccaatgtttagttttaagcaccagttatccaaaattcaaatgcataagaggggcaccaagattggtattaaatccctaacatctagcaattaggtcctggaggccacaggaggtaaagacactaaaaagtgggaaaaccatgacaaaaacatatttgcaataaaaggagaaagttacttgaagaagaatgcataggtagagtttataaatcaatattttaaatgctacaactacagtcatattaatgtctatatccacatttcacttaagagaaacctaatacaataacattgcaatctaaaaaagaaactcaaacctgcaacatctacaaaaacttcacgtctgtagctcttgtgtctacccttgcaccaaaagaacagcagaccaccaaggaaaaggataacaactaaccctatcacaatgccaactatgaggccagtttttggtttatgtgatgaacctgccaatagtaggaaaattagtattcagcttgtagcaaggaagtgggaaatagataacagcaaatgaaaaggatggaataaatattccgatcaagtaaccttgatctgcattatcagtttcacaaggttgatgataactcgcaccacaattcaaattatttccagtgaaactgcaataaggagcacagttaaaatagtgaaatgtaatggtataaaatatatgttaaagtttgaaaaatatctcattcacctaaattcaaataatattctatccaaggactccatagacaacatggcatatggtcatgccagataatagaggaaatgtaaaggtaaaagctctgtattttaaccaccaccaaacaatataatgaagcatttttttttatcattattgctccaatttatttcacttatgatgttgagttccctaacatggtattggatccacattgaacaagcggttgagagttcaatcctcagtacccctttatttcatttcaaaacaacttgtggcagaaaatatcagttggcaaaggcttggtccatgcttcaggatcaaaaggtttacagatgataaagcctgttaaaagatacaagtaacaccagttctaggcttttaagcaaaaccctaagctcttttagggtgactgattccttatttcttcccatttctttttacacttcatttataatgggaatatacaactccactccgacacccatgattcaacagcattaatcatataatataaaggagtttgtgtccaataaatcctatttcctagatgttggaaacatggaaagtagtcaagctacaagaactaaattaagtttgttgaaacacaatatgtgacaaccaccaatctttcaaatgcaaataaagaagtcgaagtgtggaaccagaaatgaccattagaatcatctactaccggttgattggaataagttagtaattgttagatgaaattctatatctggactctttggatgtatgtcaccactatttaagtgtttcatgggaatacattgtccttgtaatcagggttagagagacaagtttaattggtgctttaaatgcatcatatactaattttatggttttaccatccatacttgtatttaggaaccttaaataactgctctgggatttggccactcagattatttgaatctagcagactgcaaaagagaagtttgaataatcaatcagatactaaattaatgaaatatactttaaaaaaaatgcaaagttctagaaaccattattttacatacacattgattaagattggaagactggcaagtgattcaggaatagtcccactgagattgttttgactcaatgttctggtagcaggacaagaaacagacacttttaagcattgcacaaaaaatacatgctaaggcctaagactcattatatatgtagaacctagcaaacaaaatgtcatacttacaagaattgaagctttttaagattaccaagggaagatggtatttctccagttaatttgttgctttccaaatccaacctgctcaagcttgtcaggtttcctaactcttttggtatgtttccagtgattccattaccttgcaaagaactaatacaagtataatatgcatcaatttactttcccatcatcaaaatttgagtgagtagaatgacaaaaataatttttagtattatggagttgaccaagattgtgtggattttttgtgatagaatccttacagagctgtaacatattttagaactcctattcttggggtcaagtatcctgtgaatcccaaatatgctagtgatctgcaatgaagcaatttatatattacacagcaagcacaaaatcaagatttaaaaatgtgaaatataacactttctacaataagtaatgacagccaacatcttcagcaaatcaaataaattaaagaaaacaacagcataaaatattaaaatatcttacacttgcatgacattgttgtttgagtcacagtaaacacgtgaccaagtacaaggattcacttgattttgattccagtcagtaagctggtgagctgaagcattcaatgatatcttcaatgcaaatagtgcatctcctgaaatgaacaagaacatttacacacctactagaaccaacagcaaaagtccaaaaccctagcagttttggaaaatatgaggcatccatttaattctgttaataaacagttgtatgtatctatgtattcctcagaaatgaattggaaattaaagtttgaaaagctgtgttttatgcccataaaaagataatcaatgtatgtgcatttagcagttaaattttacaaagcttatatgatttactaatgggttgagtgccataagaacaaaagaatgtaccttgcgtatcaggcaacacaaaagaacataagcaacccaatagcaatagcacaaatctgaagtccatttctactggcatcaaccactgacacaatgtccatgaaaatcaattaaaatacaagcaacttccatctctgcagcacagaatcatcaaaaccattaagctgtgaaaattgaaaaaatgtggtaaatgccatacaaagacaaacaatgcagaacaaattcctagaatgatgaaaacaatcttattgcagaacagggtattttatgatcaaacatgaagctatgcctgatcgaggaaataggaagagtacttttcatagccattattagaatgtgggtcacaagatatggagttctattttatgtctagttccaaggtaaaaagaacaaaacctttttgtttcattctgttctgtacatacactaagtcttattgcaatacaaagcgtacttcaaaaactaactgtgcagacatagacagccgcagctaaactatctgcttcacccactccccagtctaaccccataaaaaggaaagacggtctataaaaaccaatcactctgaatgtaacaaccaatctagacagtagctaattgacacttttcaattctcttctcaccaccctgtaaaagggaaggtcaatcgcaagttttttcaattacttatttggattaattgccaactactgacacctcatctaatcctagcaataaaaaaaaaataaaaaacaaattacagaaaatcaccaaaggtgaagaaataagcagtctaaattctcaagacaaccaattcagtgaacttctaattttatctggaagtaaataaaaaaataaccaaagaaataattgaaaatcacaatactccatccactacactgcacactcataaataagagtcttaacataaaacactgatgtgatcggaaccataccaaacaaaactaatcgaaaaaaaaatgagaagacaaattccataaacttaaataagattccggaaaaataagcgaagaggagggagaaaatcaaatcgagtaggcaccaaatcgcgcgcacaaagggacaaaggaatgcatatatgcccaaagatgggtcaaaaacaaaaggcatgggcagaagcagaacagtgaacagtgaacaccaacactaacaaacacgattgaaataacagacaaaatcataataataataacaataattaaaaaagaaagaactgaactgaaaatcggaatcgggtacgcgaaaagccggtagtaggtgagggatggtgaagagaaggaaggttggttcagttggtgaaaaggaaagaaagaaagggaaagctgagtactgacgaagaaggatgagagtgagagacaccaaatctggaaccgaaccttctatccctcctttctctttctctttggttagttaaatgcaatactaataggcttttgtaatagtaattcgtttttgcgttttcctacttcctttactagatttgactatctgcctcacaagtttctcttccctgcactgatgagagtagtttgcatttaaatttaaatatgactgaaaatgaaaagcaagttgcgataattattgcctctctctctcacactcccattggactgctctgtctctcgctggctcctttccaatggatttttatttccttcaaaatctcacccatcatttaatgtcgacatgtcttcgccccacgtttcattccatacaaataaataaaggctctaacggcgactaagagattggttaagaaattattaaaaaacaaatgtttttatacgagaaaccataatgagcagtgtaattttttcatcttttaattaaaatatttttattttaaagttcttaattaatgattaacatttgctataaataaaatattaactattgtctttggacatttattaaaaaattaaaatatttttttattaggaataataaaattatggtgccatgaatttttattaatgttcttatatcatctcaataatattttttttaaacccatatcattagtttacaagacccataaataaattactataatcaaatttttgtgtgtctggtatattttaccttaaagattttaaaaagattatgacagtagtatgttcttgtcagaaaatactactgtattagtagtataaatattaaaagtatgcttgaattaatcacaaatgaaaaggaataaaatgaatttcgtgtaggatttagtcaaactatttattctagtcttaaaagagactatttataatcttatccagacagtcataactcgtactaacaattaaaagctagtcaaatttaaagtaatcgtattcaatgagctataatgattaatgaccaaattatataaacaaactgttcttatacttcaattttattttgtgaaccagtctgtcataaccaattggggcgggttacccactccaaagacgtgggcaaaaatatgcagtctaccccatctatgggtggactagtaggctagcatatcaaaaatataattacaaaaaatgtgttttatacattaaaaaaacaaattaaaatataattaaaacagtttgtctctgtatagatagacttttgaaatatctgtaaaacttagttttttatgtacataaggtgaaaagcctaaagaaaaaagtatgagagagaatataaaatgaattatgataaaattgagtcgaataaagtaagaaaaagatactactgcctaacaaaagtatcaggtgctgaaaatccaaaggagaattcttccactcaatgtagggagatgcacaagcacaatcctgcatgcgctgtgttccaattgttattttcagcaaagtgggcaaattattaaaaataatgtttttttaataaatattttgaaattttgagctattttgaaactattcggaaatttgagacaattaaacacattcaatttgaacttgtttcagtcattcgctaattcgatttttaacacttctttacataatattgatttttattttaaaaatctatccctaattcaatttttaaaaaataacaatatttttgttaaagtattaaagatcgaattagtgacagactgaaaaacaccaatttagacgtgattaattattccaaattttgaaataatttcaaaacagtcttgcaaatttcaaaatacttattaaaaaacattatttttaataatttgcccagcaaagtgaccaaaccacgtgataattgaataattgacaaaggtgaatataaagaaaaacattaatattccgccaaaaacacgtgcgtgcacacacaacacagtccctcacaattttttctttcaaagaatagtattttgttttaaggccaattgcacaaccacttggcgaaataattttacagattagttactttaatgttgagagaaattaaccacctttacattgctagtttgcaatttggatccaagaaatcacagttattatagcatgtttggattaacattctcaacgtattaatcgctaaatattcttttaaataggaatctatttgtatcttttgctttgggtgctttccaaaaataacccaaagatgctataaatcgttagatcaatatcttaaattatactataaattgtctttcaaaaaaattataatataaatttgcaattagatttaaatgtaatcgtagtgctacatagctgtacaggttttattacagactacgtggcacatgatcgtgttggtttcttcaattaacaaacgttaattataaacaaacaattggacagaaatcatatcaagcaattcatgacgggtttcgtagaatgtctttcataccaattatcgttgctctaaatgtaattatttataaaattaaaattaatcatgttggtttgcgtataatccaaaatacactcccagataaatgatgttttcatgtgagggaatcatgcctttataaaatcgaattctttttatacgttgtccgtgaacaataatcaattactacttgaaattttttacaaaagaagggtcctgcggccatgctttgttacaagttctgtcttctcgtttaaggttcatctaatcgaaactgtgtgtgtctttctatttgacatttggtgattaactagccacggaaatgtatgtaggtgagagctgctttgtctctaatgcctaattgatagaaaaatattattattatgttgtctgagactattatattctttatataacatgtaacttaaatataattagtcccttttatataaattaaaagattaaatactttaagttgatttgataattgaagaaaaaaaaacagatgataagtttgaattattctcattaacaaaaaaattgataaattaataattaaaattgatcgataaaaaatataatatatatatatatatatatcattagttaaaattataaacatatagacatctcatgatctaaatacttaataatttttgcaattgacaagagtatgctatatcacatgattgctgacaagattttgagaaccaaaatatagcatgacaaagggtattccaagatatgattttttttcaaatgataaggagactgacaatgcatgactaagatggaagggtgaatgaattgacttcataacagcaatggccttcaactcaaatcactctgagacctgcattacactagcaaaacaatgaatcaacgtccgtggggtggtgaatggcagacaaacagacaaaatttggcagggttggaattctatgcttattaggctactagtctacatttaattaacgaataaaatagtagtactaccattttcgttcttgaagtttatataaaaaaaatctagtatgtttttttaacatcagtttagtctttgaaactttgaaaagagagtgtgatttttgaaaaaggcaaaggggagtgtacttagaaaaaatgcaagtggatatagaaaatgcctaaaataaaccatgtgcggcaaaacctaattttgtatgattaagaccactcgagcccagattaatttgtaattatccgaagccttaatcaaaaccccaaaacagaacttgggcacattcatgggctgttgtatatataattaaatgaaaacgtatacaaataagaacttaaaggaggaattaaaatttaacgaaataacgtcagtgtgtgagaagtaaaaaaattaaacagagaaattttttaagtattagtaataataagaatgttttttaagagtaataataagaataataaaaatacagaaaattgtatactattaaagaaaattttaattgagccttaaagaataataataacaataatataataattttaataattataaataatgatagtaatcataataagataaattagtttatgcactttttaaattgttatttaatcataaatttttatatatataaaataagtttattgaatctttataataatatcttaaaagttttttaaaattatatttttatttagttgacaatgtaaaatatttcaattcatagaaggtatttttttttcttacagtgttttatagtttagcctgttttcaattctttactcgatatttgtggatttttgtatataatagtaatagtaatactttaaaaatatttagtattttgcaaaaaaaaaaaaaaataacattgacttgaccagtgttactgcatgtgacattaacttatttatttgtttatctattattagtagaaatccaagattaagggtataaaaactttaagtttgagatggttcatatttggcatgggagaggaggagggggttcaagatttaaacatataatttataagtgagaaataatcctcacctaatatacatgtatttttttattggagtgtgtgttgaaaagaaatcatccaatcttgagttttgtaattctaggatgggaatcacaatatatttatttaattgtacgtgtggcaattggaatcacatacaatgcaaggaataattttgaggaaaaaatcattaaaaaaaccttttttaagagtggtatttgaaatcaaagatagattctgtttatatgtagggaagatattaacatcctacaatgcccatgttttaaataacaaataattgttttattaaattttatgatttaaataacattaaagaaagataaaattgctactcacttaatgtcattaaccattacatgagttaaaattattatttttatttgaaaccacaaaataacatagaaagaaatcccttcttttaataactatactatatctaccaaaaaaaaatcctccaatttactatttttattaacaaagtgaaaaatcagaagatactaggaaaacatgtgttcacgtgaaaaacactgttcacgtgcctgtgcaattcataatctttttttataaaaaaaaaaaaaaaaaaaaaaaaaaaaaactaagctttttccatattatgtacattaacattgcataaaaaacaaataacaccgtgagtcatgcacacaacacacacaaaggcacccatatattttcaaccttttttattatcattcctctttcccaattaaaaatcagaatcactttctcatgttttttttttttttaaatcctacacaaaattatctttctacatagagagcaccatcagcgcacacaattaccaattgattcatggaacaaataataataagaaaattaaaagtgaaaggaaattgaaattagtataaacagaagagcattactctcagtgaaaaaaaatacaattctcttgataaagaaataaccgaacaacatatatagatatacacaaaaggtagattacatggttgataaaatacacacttttttaatatctaaaagaaagaaaagtgaaagaaaaaaacttctgaattttgaaataattgttgaagtgtgagccttcaatccctgtatgaaaaatagatgtgtgagaagttttttttttctctctatgatctttttttttcccccttttttcctctgaccccttcttgagtgattgtgaaggctttttataggccaacacaacttgatgtccaagccatcagatattcttcctattttttgcatatatgtgattgttgacaacaacataatcactttgttaagaattttctgttttccaaatccaagattttatccttgataacctccttttgctcactaagtaattgtttctaacatttgtcactctttttcctttgactaagtcttccctatattttccttgatgatatttttctctcatttttcaaaaatgaaattgcacccaaataaatattggtattcacagtatgtcttacctcaacacttcatttattgctcacttctcactgctcaggcaagcgatctatgaagaggtaggtattgcatgcccaacatctcaagtcaacacttcatcttttgctctgttaggcaaacgacctatgaacatgtaggtaccgtccaacattagccttaacagtatctttaatagagagtgattatatgggtttttttaaagtcttttaatcatttttttttagttctcacaatactttcttgtggtctcataataatcatatcacttataaaaaattcctataaaattttgcttcaatgcaaaaaataacaagaaattttaaaagattcacatatttatattatttcaataaaataattaattcatttttttaatttttatgaatacaaataataaatatgaataattgaagaaaatattaaatatcaattaaaaataatgaaaattacataacattgaaaaaaaatgcttaacaataaaaaatacatttttacataataatagataattaaacataatgacattaaaataaaaaacataacgaaggaaataaaaagtattacgtaaaaacattgatccaaaactcaattattagcctaatgatttctttatcgatgttgtcttccaattcctcaactatcattcgatccaaaacttcatctaaatcgatgtttggatccattatatggtaactgaattgtttgaaatcaaagataaatattttgtaatttgtatgagaatatgtgagaatgatgaaacattggacatttacatagcttgactcataacgactagttttataacaactaatttcataacggctagttccaatgattagttttacaacatagaattatgaatttaagatacaacaacgacctacactgctaagattaaatatcacacacaacattagcataacatctgtacataagaattatacatttaatattctagttttttctaatatggtcacgatacttttcgtggtctaagtgttgctgttcggacatgttggatgtatccttcatgagaatttcatactccatacgcctttcttgtgtctcctttaacttaataagttttgatgtgctcacatttttgtccttcgtttcactttctatgtcagataaatcgaaagtgttagaaggttctattccttttctcttcctttttgctgttttttgtctaattgggcaagacattggcgatgacgtatcatattcttcgacttcaatgaatgtctctaggttagaagatgacgagtaattttcaccagcggcaacctttattcttttttaataatttgataaaaatttgattgatctttcaacaacaaccaagcatgctcaacctcaaatttttatcagtatcatgtgagtaaatcatatgagtattagttataacatctttctctgaactttcacttctcctatatttatctgcttatttgtaacacccgttaaacttttgaactgggtgaatcttgttccatcgagatttcaattgaatcaaacttctttcacaaaattgtccgctttgacacatatcatcattgttgtacacattttttttttatctttgcccaatattactttgatgtttagtcaacacctattattgaatcatttaacacattgagtcacaattgaacaagaatcacatcttttgtcactgagaatgttgtatgagtatatttcccactagaattttgtgctctctcatctagtaaaatattgtctacactgattggtgattgaatttcattgcttggggactcaatattggataaataatgcatataacacgtgtttggattggagggattgatggttgactacaaaattatggattttgagaactaccacttgtaggtggctttacattggatgaaggatgcatataccacatgtgtgtgggggggggggggggtgaatacaaaacacattgtgatggattttgaaaattttcactggtaggaggaggtggtggattcacaacacaacatattgcgatggattttgggaattttcactggtagagagtgtttgattttgcaaatgactagagtaatattgcaaattatactggttgcgatcaattttagagagaataaaaaaaatcgaggcttgataggaacaaaaaaaaaattaggagtataaatattgtgtgcaaaatttaatctcattgagccaaatttataataagaaatctataacggtgatttttgttcacaatgatcatcaaaataacgactagtttttttaatgttccctttgctgttttatttttgtccttaatgcttttttcatttgctctttaaccaaatttttacaagaaggctaccaagaaacttccttttcattctttattccattttcttcttttttcattttctttgcttctttctctcttaccatttcacgctcccccttccctgtttctcaatcacccctcacaccacaacacaccagcaccatcacagccccttccttgctcaaccaccatcacctgcagacctccctcacgcaaccaccactataagatggttcattgatctaacattgttgcccttgttcttcttcccattatttttcctcttttttttagatgggtggttgatgttggataatagtaatttttttgttaagaacatggtgcttatatacgatgtacttttttttttcaagaaatcgttatgccaccaagacaatctctagtgcaaagtttcttcaagaaacgatttttttaagtaaaggaaccataaacatataaacatttttcattgaagatgctctaacaaatcaacataccacatagtgggggttccttttctcacccgtagtagttagagtgagtagttagagtgatgtctttttatattataatgaatatttgatccatttttaataaaggaagataaaatagatatattttttttgctattttatattctagtaaatattgtggccatctatggatattctcttgtgatttatatatgtaatttatgctaccaggtgcacaaatttttttcataatctcttattttattacataaattggaaacataaaataaatgttaaaaatgaaatatcaaatataaatttgttaaatgttaggagatgcaagtatagtttattttaaaattattttttttatttttcaattatatttaataattattaaatttattaatgctgggtaagtattgttttaagaaaaaacaatcttttttttttactttcaaaataatataagaaattaataaaattgttataatataattttttatataatccgaaaaaatttcctccaagtttaccatagttactatctaatttataataatagataatagaagtagaaatatataatatataataaatttttaaattttaattttaatctgttataaatttgaatagtatatatgttagtgttataagttaaaatgtgatgataaaaaagatttatttatgataataataaaatgaccatagttgtaaaatcaagatgaatttaagatctaatgatttaattgattgatttaataaaaatagtaattaattatataaaaataattcttacctctctgagtagagtaagaaagcatcttatctgaagactcttgtctctattacatagtcacttgtcctgtgactgtgtcctctagaatctctcatagtctgcagaagactctcctttacttcactccatcatcaaccaatcatcgattgatcacacacaacccccaatcctcttaaccttaacaacatggcggcggggtgcatcagcttcactgccacgcgcgaccgctgcttccgcttctccttctccaacgcgggcctcaaatccgtgacaacagacctcggcgacggcacgatcatgcactgctgggcccccaaggcccacaaggactctaagcccaacctcctcctcatccacggcttcggggccaacgcaatgtggcagtggaacgacttcctctcgcccctcacgcgccgcttcaacgtctacgtcccggacctcctcttcttcggagactcccacacgacccgccccgaccgctccgaggccttccaggcccagtgcgtcgcggccctcctccaggcccatgggctccagagaaccagcgttgtgggtataagctacggcggcttcgtggcgtacagtctcgcggcgcagttcccggagcgcgtggagaaggtggtgctatgctgcgctggggtgtgcttggaagagaaagacttggatgaagggatgttccaggtgaagactgtggatgaggctgcggatattttgctgccgcagacgccggaaaagttgagacagctcgtgcagctcgcgtttgccaagcccgtcaaaaccatgcccacttgcttcctcaatgattacattaacgtgagtatgttaatttgatgcttcaagccttcaatttttttatttattttttgtttctcatatgtgttgatgttttggattcatacaattcgtgtgattttgcttaaaaagcgcaatttctgttttccttcctgatattttttttggtcggcttcttcctgattcaattgtatgatggttgattatatatgtttatgtttatgtttatgtgtcttcttggattttaccaccatggtgctgaatagggtaaaactattgtcaacgaagaaacggaaaaaagttaaaagaacaatagtaggaatcggaacattgggaactggcagggctagtgcgtgtgatctaaacgtttccccgcgatatatattgcatgttttgtttggtttgcagttaaatatgcatgtttgatttgcagttaaatatgttgtggtgtattcctaatcgattggcaaaattatttttgcctaaaagttaattttgcaacggacccttacacactcaattgctgttttcagactaaattttgtcatcaatgtcattattgatgcttggaaggttcaactggttttttgggcaattctctgtgcactggatggttcaagtgtattttccatttgatttttgacatttgtactggagattatctattcagcaataatggttggacacctaacagtgcaaataccccattaactgatattttattctctttttgttacgtcgtgtctatacactgaaaatggcatttggaggtccatgcatcattttcctatctacttctcagttgtccttttacttgaaaattaagttgtgtctgcttgtatgttgtctgattgctggatttggattctctcttctatagtccttttattgagaaaaagacacaaatctaataagcatgatatgaaactctttagtagtatttgttaaaaattgtctttctctctttaattccaactatacatgattactcaaaaataagagaggattcaaacttgtgattggctatcccttgacgtgaatacacaagcacggattgccaatttaccaaatttcattactgaaactggttttacttgcaggtgatgtgtactgaaaaccgccaagagaggaaagaactaattgaaacattgcataaggatagaaaactatctaatcttcctaagataacccaggtttgttattctcttctgacttaacattaatgtgttaatttcaccatgtttgcaatccttcactgaacttctcaaatggcacaacttttcgatgatgcagcctacgttaataatctggggagaaaaggacctggtcttcccaatggaattagctcataggctacaaaggtaatttcaaataattttagcgcattattaattttatcttcaaagcatctctaatgccttcagcaagcttatgtcttgaagttttgggaaagataccaaatggaatagtggcaattcagatatcagtataacatgaaagcataaagcatatatttttattatgttttactaacttaaaatctcattttccccccgatgtttagacatttgggagagaacgcgcaactagtggttattaaggatgcagggcatgctctcaatgtagagaagcccaaggagatgtacaagaatttaaaatccttcctcattgatcccactactccaactccaactgtgcaaaaaaaccacagtaacggcagctaagtggattagcagagaaatgggagagatttatttttcggcattgtttttgaatatgcttgtgtatatatttgtttatacgctgttatcaggcatgcggtatttttcttctcggataggacgagaagggataatcgtgaaactggttctttatagagtaaaagaagagtgtatctgttgccaatttaaagtatgtggatgagcatctgaaaactgtaaactcatatatcaggaaactcggctacggatagaatctgattcagaggaatttgttgccaaggatacaggaattgcatatgaaatatcatgagctggtgtgggtatttcaactcttctatgtctatgcttttcaggtgtgcatatatatatatatatatatttgtctatttgtgtctccctgctttagtgttccattttattttggaaaaataaataagtaaattatattgatattacagtgctggctgccaatgactaatttagtcactgtcctatttggcagtttagaagggagagaaaaggaaaggaaacgtaaccattaataggagaagggagaagaaacaacgaataaagtggagggttaataaagattaaagaaagaacccctttgggcctttgccttcctttatgcaaattcttacccattcaatccaaccactctgacattctccatttttttccgtccttttttcgggcttgagtctggtaagttcaccaaagcgaaaaatagtaaagaatgaaatgaagtcgcaaaagatatatatatatatatatatatatatatatatatatatatgtatacacacacacagtagaacatattttactccaaagtaattgagttcttctagttactgaaaatccacaaacactacggatgaaggtagggttattctcccctgcttctttgatcataaactattttaatagaggaaaacgaatccacaaagactacgatataggaatggatgcggaatgcctttattcttccttttgagtaaatccacttttctaaagcaacttttgctaattaaaaaaagttgatgattgcctcaattgaatggctccactgagtcctgatcaaactaagcagaaaataaaaccagccaaaataggactccaaacatgccaagctgctaaacattcacacagaacagatggttaatgatacaggcatgcataactatatttttttctttgctagagagaagattattataaagcgttgtactttcgcatcctattccttctgcctatacatgaataattttattcattactttcgtcatactagtcttacaccaccatttagttttaattaataaaataaataagtaaataaataaacaaataaaacacatttcctaatacgttttttcttctttgtttccgcccacccaaatgagaatatttaagtgtagaaaagaataatcttcactgaatatatattataacgaatgatttcaagaacttacaaaatgattaaatggttgtttatcttcaataagaacttgaaccaaacaaaacaagtactattagttactattattattattaatatgtatgtgtgtgaagaggtacgtacgtacgtaggaagaagatgattttcataccaaaataacaggaataaatactcgttaaaccttacaatttcatacttatataagaaaatcactgactattaactatacccatctcagagtgacagtcattttccttgcgtatgcgtgtaggaatatatgaaaggtgagaagaatgatgaagaacacgaagaaagcgagacaacattttgacattgtttgcaaaagtaaataaaaggaaggaaaaattgacgtacaggtgaagaagatgtgattcgcagaggaagagtcccaaacgtagtcctggttctggttgaaagtagtggagcaatccaagctggtgttatagcctcctttacaaacacacacaaacccattcccaggcggcgcaaagccgcacaccccgccgctactctcacaaccactgcacttggtagtgccatagttattatccaaagccccaccaaaagagtacttcaaggccactccatagacccagtgagtggggtccgtagggttatccccgagcgacacaacagaagcataggcgccacacttcatggctttcaagtcgagctcccctttgccgtcgaggttggcgggggagtagacgcagcaggtgttgctgggggggaagagaggcaggccgagggcgacgacggcaggacacgtgtagagtgatgcgcagaggtagtcgaaggaagggtcacagataggtgaggatagggaagtggtggggggttggcaggagaggaggaggaaggtggaggaggcgatttggaagggggaggtccagtctatgccgaagttggtggatgaagggtgcatggaggtgcaggtggacatggaaggtgggctgagggtgagggtggaggtgctgtaggagatggagctcaccgggtaggagccggtgtggcttttcaggaagagttgctcgccggtgccgttggagccgcaggttacgtaggggctgaacagaggggagccgcaaccgtggcccgtgccgaaggggtacttaaccttggttgagccgcaggtgtcgcggcatgctgtggttgtgggtggggctgatgcagaagaggagaatagggagagaagggtgaggaggagagtaggaagaggaggtgttggcgccatgctttgagccttgctctctttctctttcgggaatggagtgctggattaaataattaatgaatttcccagcttgctacacactcggcttcacatgcacatgtaataaagataaaaaaaatttcatcaatcaaaaagatactcactaattcgaaattggagttggattgtaatttaagaaaactgtgattaagaatttatttttttaaggatcaaatttttattattagtcgaattattcaacattaacttttctctcaaataacactttttttttagtgtattatgagtatacacaaaaataaatttaatgaataaaatgttttaaaaaaataagtaaatatagtacaaatgtttaatttgtatgataaatgattatgtatattcaattaatattaacacattcaattgtttgattaataatatttaatatatttaaaaattattgaaaagagagtaaattttactaagacatgtagttatttataattcatttagaatatgagaaaataagttgtgtgctgatattataaagtaattttacttatattgccactcaaataatcacggtcaaactcttagattgttcatataaaatttaacccaatttagttgttaaaaaaaatatacttgaaccaagttgagtaatagccagtgtaattaattttttttttcttttaataactaagaccattgtgaatatataatgacttaaagattagataaaatatgaataaataaacttgattttaacgggaaaaaaaataacattttaataaccaaagggtaatttatgaaaaaaataagattagattggtaatttctattcattttttatgcttaacttcttacactcattgtctgtatgaagaaattattaaatgcaaaaaataatttatgaatcacgtacaggttagtgggttatagtgtatcacaacaaatgaaaaaggttaaaagaaagtggaaaaattgttggaaaatgcttagtagtgccttaatggtattgattaagtaacttagaataaaaactccgacctgccggattcgaaccagcgacctaaggatatctgttatcaactacagtcctccgctctaccaactgagctaaggtcggtttatgtaataattagcggtacaatttttttttattttaaatataggtaatttctcatctaaatgaatgataagatatttttgctttaaggatcttacattaactttttaggaaattaaataagtttgtaaaattaaataaaatgataaaacttaaaagtaattgaaaagaaatatgttaagcttgttaaatttcagtctttatagttaggaaaattagaatggagcaaggaaggaaatgagttaggcctttaggggcaaggctggtacatggattttaattttaataaccacaataaatcagacggcgaggaacaagcgaagggagaaaagcaatattagggtgtccaccatcaaagagaacgaacgaaggagcgaggcaaggcaaagcaatagcctcatcctcttcaactcagtgttctgtgttgtgtttcactgcgctctctctgtgttcacactcaggttaataaaaagggaaccacgactaccaccagcttcctctctctctattccaatttcactccaaccaaaatattaactcttcattgctaattgtctgttgcgcttacatattttgattctttcactcactttctcgttgcgtaggctagatttcagtgttatcgtttctactctttattttaatgcacattattgttgtagttcttgtgtttggaattttattttatttcttatggcatgtgattttcggtgttttattggtttctagtgtatgaaatttgaacagttgaatagtttgcaattcattcctaggttcacttggcaattcgatagtgttttgtttttgctggtttgatattctttttttttttttttaatatcttgttccttctttgaacttgccgaactcatacgtttttttttttttttttggtatactctagaggttagattcagtgtttaactttatctggtaattgattttatttagatatcggtttgcatttggtggtaattgattttttcagtgtttgaatatttaggaaataggtttcatttgatttagaaaatgatttccatgttcgagatcattataagaaataggatttgaataggtgttccatagttgtcaatcctggatagtggcgtgtgtctgtcaaccccataataaatgctatagcggtatagtgtatggcatgatgaccggatatttaaaactataaagtataaacaataaatgctggaaaattaaacaaattactcaaaattcatgaaacatacagttagcaataaagtcataggtcttcaaatccgcatggtgtgcaagtctcccaggatgtgatggtctcttaccatgctagcatattaaatttcagtatacattttttttccagctagcagaagttcatcagagaaggttacatattagatggcaataacaccttttggtagtacatctgctgcacaatggggaattcatcctcagctattactagggtccagtatcacaggaaaggttgcaccatccagccacaagtgagttctatgattgaatatttgttttgtagaatgttagtagtataggtgtgccgccattaatagcaatttatgaggcactcattgaatgtaacagcaatacgtctgtggttcacaggtttgcacccctaaaaatccttttcatgattcatgttgatgcacttgtattgcactgtgggaaaggaatatattactttttaagttttgacattgttttctctatcatatcaatcagcagtgatatgtaatcataagttaggtgtaatttgtgattttgttactttaattgtcattgacagtaattttatggtttggatatggtctgaatttctcaaaatctagagaatgctttccatcctatctgtctttgagtattgttcgatttagagggagaggaagaaagagaaagtgagaaaaaaataatatagagagaatttagtgaagggaaatgctttcttattacatagtttatgcaaaatatccatacgtataggattttaatagacttggtggagacttttccctaggttaatatcaatcatagttatcaatctcaaatagcagcacatagtggctagctttgaaaaccggggatggctgttattttaaatattataatacaaactaaatagtttatactatacatataagtactcaaaaacgaaagaaaaacccaaaattaaagaaatgcatgataaataataagagtagcagtttacacaaacaatcaccatcaatctaggagcaagaagaacatagtaatgacatcaaaaaatgaaagatgatggtgaaattaataggaaaacaaataacaagttagataaaaattaatagaatgtgaaatagaaagtttaaggaagaagaaagaatggaacacccggaaaaaatagtcctgtaaagtgtgaaggaacagtggttaaaacaggaatttttttatgtggaatggtcaaggaagaagggtttcaaatcctaccattgaagcaaaaaatgcatagaaaatgggagagaaatcacaatttatcccccccaaaagctaaacaatgttgtttcagggtaaaaaaaagtgtttttgaagcatatatcgtgatagtactgctatttgaatcctgttgcaaccaaggaccacttcattctgctacttcgcgctgctatagcatgatattgactactgtgatatttattgagtgtgacttcgtagacattaataccatgagtattaaatggcagtttatcatgtgatacatgaatctactatttccaacaaatgttaatattctttagcatcctacacagcagctatactcaaaattttcagcctagttcactgtgctggattttgtaatttcttttaactcaccttttttgcattgttaccggcagggtaagctttatggctgcaacaagttcaagctttttttctcgagattctacactgctcagtgtgggtgcgccccaaatttttaatcatcgcaagggatcaaggttgattgttagagcaaatgctgtaagtttaaaatgcactcttcagcagtgatgagttccttttgtgtgtgtgttttaaatatatgattttactttgtgaaaggatgccttgttgtctcttatttcaactgtataaagcccatgtgaattattcaatatattgcactgaatatcctttatttgtcaaaatgcaggattattattctgtccttggggtttcaagaaatgctagtaaatctgaaattaagagcggtattttctatttgtttccttatctgttacatgataatacctccatctctatataagcaaaataattatctcagtaactttagtctgttgattattaatgattacctactttcttgtaactctttctgcttcctttgacctttgagaaattaaaataattttactctaggtgtgaaggtgcatatatatataaagcattatctctaagtgtttattaacacatcaaatagttgacttcaaggtttttgctgttgtttatataacacatcacaattgtatcagtgaactatgtctcagttttctcttttccatctaatagctaaacttgaacaattgtgattgagaaattgtcatccatcagaatctgcatattatttgcttgattgtgcatattcttttattgtgattagtgacctagtgtgtgtgtcatagcaatattaaagctctttacttttgatatttcagcatatcggaagcttgcccggaattatcatccagatgtcaacaagtgagttaaattcttttcctgatttcacatattggactttgtctttttcctgattcattcctttcacttgtcgccaccccccacacccccccggttgtaaaaaaaaaagacattactgctgtagccaacatggtttggctatctcagattatggcgcttgttgcttgtcttgtgagtttcattcacatcatattttgaacattggttgataatgctttctctgtgaattggtttctttgtttattattgtttcgtaatatattatatactaaacaatgatgcttattttgttactgtgatttgcatatatagtaatttactggcaagcaaaatgacaatgtttgttcaaattcaaggggggtggagggaggacttaagttacaaaaaatgcaattccaattgagcttcattttcaaacatttttttaaaatataaaaacagctgaaattaagaaaaataagctgtcttaaacacaattttgttagttgcataattttctggtgtaatctgaatcgttttataactgttgcttattgttaaactattgtctgcattttcttgtgttgcagagaacctggagctgaacaaaaatttaaggaaattagtaacgcatatgaggtaaaactgcagattattaaactcagtttgcccttatgcatatgtttaacaataacttgtcttctgcggataaattccattgcaggtgttatcagatgatgagaaacgatccatatatgacagatttggagaggctgggcttaaaggttctggaatggggatgggggtaagtacctgtgatggtgatgcataattttattttgtttttcttgtttctcaatgaatgatttctttctgtcatgccaggatttcagcaatccatttgatctgtttgaatcactgtttgagggcatgaatcgcggtgcaggttccagaggttcttggaatggagcaattgatggtgaagatgagtattacagtcttgttttgaacttcaaagaagcagtttttggcatagaaaaagagatagagataagccgattagagagctgtggaacttgcaatggttcaggggctaaaccagggactacaccatccagatgtagcacttgtggaggtcaaggccgggttgtctcatcaacaagaactccattaggcatcttccagcagtcaatgacatgctcgtcatgcaatgggactggagaaatttcaacaccttgcaatacatgttctggtgatggtcgggtgaggaaatcaaaacggataagcctgaaggtcccagctggtgtggactctggtagtcgtctgagggtccggaatgaggggaatgctggaaggagaggtggttcccctggtgacctctttgtagttattgaggttatcccagatcctgtccttaaacgtgatgacaccaacattttatacacctgcaaggtttcgtatattgatgcaatcctggggactacaattaaggttcctactgtagacggaacagtcgatttgaaaattcctgccgggacacaaccgaacacaacacttgttatggctaagaaaggtgttcccttcctgaataaagacaatatgaggggtgatcaattggttcgtgtgcaagttgaaatccctaaaagactgagcaatgatgagagaaagcttattgaggaacttgctgatttaagcaaaggcaagactgccacgggtaggagataatattttgttggaagctgtgtatctatataaatatttctacttcaaatattcttctttctcagatgcatcattcttgattacacatttactgaggacagcttaacagctattgtactctgggagggattaaattgtgttggtggaggttgtttatttgtccttggaaacaggagatgaagagcagaagaacttagagatcttttttttcgttggaacttatactctttttgtaatttattttgcggtggggtgatattgaactatgctttaggttcaatgctatctttatttccaaaacaatagatgctctgagaacaaagcaaataataattatttaatcccatatatcgaaagattatatattccttgttaccacacatgcacagttggaagttgaggacagttgcagatattgagggatgtcttattgcccgtagtggcaacgttttttttttcccccttcctctttcttctttgttgggggaacgttgcaatcgtatcataaatggttactactccatcagtgtaagttgcaatcgtatcataaatggttactactggttgcttcagcgtttttgtaataaaatgtgtaatttccacgttcaacgtcggtgaaacgagtatccgaacacaatctaaacggttaaagaactacaccttttgccttttatacctgtacaggaagagcaatgtcaatttcactttcaacattttttctgcttctaagtactgaattttaaaagaatttatcaatattcttagttgcactatgtaattttggtttttattattttaattgcacaaattcggttatcatactttttaggatttttaatttgggtccctttctccattttccatctgataattaacagtaggctaatagatttgctgacactacccgaacaaaagattaaatgtgtcacccaattttattatgattttaatacattaaaaagtatgaagacaaccttcgaattttcccacgaccatattgttaaaacgaggcagaatgaccagacccaactctcatgagaaccatgaacaagatcagaggaaagaacaaaaacgaagtctattatagactgaaaaagattggggtgagagagcctagaactctcaacctcaggataatggaacagtggtcaaagccacgttaaaaaaaaaaaaaaaatcttagaatatcacggatgtcataaaatttgccaaaatgtcatgccaactaattcgttgaccacgtaagcaaagcccatggactgacgtgacattcaattattggaagaccaatttcactacacataataacgaattacatatgatgcgtgacaaaaaattcaaaattatgtataaactttgaacgatcataacttttgattggccaaacgctcgaaattgagaggagaagtcctaggcaaatttccaaaggagatttggtcaaatatttttttttttccaaaaaacacctctaagtatctcaaaattacgatttaagattcaatcatccaaaaatttcaaaattgtctacctttttaattatttaattagttaatttaatgtaattttatattattttaattacttctctcaattacgatcattttgacataaagtacgcctccataaaaaattataatgtaaaattgatagtgcatataaacttcaaataatgattttattctacttttacaaaaataatgacagttttacacataaaatttaaattgattttatttcaaacaataaaaaaggaagcattttaaaagattgttaccaaagactctttatattttaactctattttttttttcaaacttaaaaaaaacacttttgtctgagtggtgcaacaacaattaaccaagactctcaacaataatcttataatcaataaatcaagaagagaaacatacccatcacatgagaagttatctaattttatagcaatatataaagtagaatatattaattaatatgtttataaaatatatgaattagccttttgatttatcgttgtgtgatatatactcagaagaatttaaggggtcctccatatgaaggagagaagaacaaatttggaaaacaattttactctaacacaagtctacgattaaacacgagcaagacatgtcatactgaaggagaaagcaacctatgacttctattaattttacaatgttttaaaaaataagttctattaattttacaatgcttaaaaaaataagtcagctggggccaaggtccccctactcaacacgtccgcccctgccggtggagggtggaggcagaggtgttcggaagatgaaggggaatgtgggattgatagagaaagaagcgaacagagaaggttcaaatcttgacgctttccctttgttcagatcttagcgtttacacattcacagaacactaacgatcataataaaaaatgaaagaaataattaaaaaaagccattcgaaaagaccaagataaaagttttgaaatgcataaaaaaaaattaaaaaataaaaaattaaaggtgatatttagtctttttaattctaataaaatgagtgagtttcaacattattctgtgtaaaatgactattttagcatcatcaagtatagcttttctatttgatttttatccttcaatatatgaaattattacttttgattcccaacattcattttaaagtagacaaataatatttattttagaaatttaaaaaaacttagaggtatcatgtgtcgtatgagtatcacataatattagggataaaaacaatataaattaagatgaaaataattaaaagaatattataatgataaaaatatatataaaggagatgattggtgatgtacttacccttgtttgaaatgccaaccagagagacatgcagcttcttgcaaaactaacctccattttttaagcttgtccttgtcactgattcttgtttcatgcttggctagtgcttctgcatagcttcctttctgatggcgcacatcacatggatccactttatagaaaacaggccaaaccaacctccccccgtgtttgaagcactccatgatcttctcaagttcttgtaaacaaaatgttgatgatgcatatttttctgaaaaaatcacaatagcaatcctggattcttgaattgccttcattagagctggcgtgatttcttctcccatcctcagctcttgatcatccatgaaggtgttgactcccttttggcatagagcatggtaaaggtttcccgtaaaaccaaaacgtgtgtcttcgccccgaaaactgaggaaaacatcataagaccatcgttgatcggcaaaggaagaggaggacgaggatgatggattagccatggtagtcaccaagctgtgattcttgggatgtttgagaaagcaacaattgagttagatagagtcacacaattgcaatttcttcatacttcatacctttttataaaggttcaaatgtaatctatgttttcatttttttttaatttgtgtttttagtttttttttaaaaaaattcagacatttccttttttattttaaaaaggtttatgattttagtttcttattttttaattaaaatattctcacccttttttaaaaatttaattttttttatcaattttaaatgttgatatttatattatgtaaatgttgttcacatgataaatattttttttaaattatttaatcattaacatgtttagtttattaaaaaagtatacagttaataagtttgaattttttaaaaatgataaatgaaatgttttaattaaaaaataagaagattaaaatcacaaaattttcaaatgtaaaagacaaaataattcaattaaaaaataagtaatctaaaatcataaattttaaaaaatagaaggataaaacaatttttattcttttataacatgaaagaaacgggctttatgggcgtgctgtagaaatcagtgaggaatattagggacgagctaggaaaattcaaaaagaatacaatatattaatttagtctcgaggaaagagtttgtcattgccttaacagaatacattaatattaacgagccgaaagtacctcccaatgaagcatctgagaatgcacgatgggacatgattgccccacattataataacccttttacaaaagatgaagaaattttgctcctaatcgacaaaaaaaaataaaaaaaaatgaaatgtgaaacaggaaatgggagaatgaaagatacagagaaaatgaaaggaagtaacttgaaagacgcggaaatacaaatggtaatggtaggatcagacatgaataggagttattttttacttgtctctgttagagaaatttagtatttgttatccgtttaatattcgttggatatctgtttgaaaaatacttacagatattttttatatacttgagtatttatgatatttcaaatttaaaaaacaaaataaaaaagggaagaaaatgggaaataaatggatgagcacctctatatcagtaaatatatcagttaccattattagtatctcagcctcttaataaaaaagtagttacaattaattccaactgcttcaaatataacaaaaatgttcttcttcctcacatttaatttactcagttttcaggcatcacaatcataataacgcaattcaaagtcaataataaaaaaggaaaggctacaaaagaaaactaacctcattagtcattgatatccacttctttccagatgcactaccaatctgaatgaacaaagggcggaataaaacaaaacaaaaaattatattactttgcaaatgataataatagagctgctagtttcacaaaagagaagtataaaaacttctcactaactcttaaaacaacaggcaaattttaaaaattgatgcttaagtttgtattggctcataagaaatttataatttgtaaataattagttgtgcaacaatccttcttcttgagcaattaaaagtataaaataaattagaagaaatactaatagaatggattctacacatacatcacgccttgactttacatctgaattctgctcttgaaattctttacgaaaatcctcccttaagaatgaaaaataacttccagtaaacataataaatttgaagataagattttccatataagaaagaagcagttggcttttaaatatagccactatgaaagattcaatggcagtgctacttataaagtaaataagtatattgaagttaaacagagaacaataaaacaagccaggaagcaaggaaaggaaactatcacaagaaaatcatgtttaaatgtcacaacaattaaagatgaatggccttttttactgttcaacatgatgctgctgtgaatgtcaatgttaaatactggccatggcagtgcatggcagaatggcgtggcagattttttgccaaccacctcaggaaatttatgaagggaagcctgacatggcagcgcaatggcgtgtttatatgggaaattttggccttccaccatgtttcactatttgccattaatgactaaattatataaagaatattattcaataccagtttaaagcacaaggtatgcaataaatgatttccacaatagtacagttttatgatgcaaatgcaaatgagaatagtactcaaaacaaagcaacaaaggggggaaagcctaaagacttcaaagccacataatattctcttccaagaactgataacctggtctccacattctgcagtgatgctccacattaaggaagaccattatttcaccattaaaaaaacattccttcacccaatccaacaaaaagcatataacttctctgcaaccagcttaaggaaacaattttttctgagtcattaacgcacaaacaatttatgcacctttgaattttttccagaggccacctcccaaaatacttatatatccacccggatcccttgcccatcaccccaaatacaaagtagtaaataaattggtcaaaactactgcacaattggtcacatcaacaccacaccagacttcatagccaaatctctgcccgactaaccacaccttgtttgatccaaggcatgataacggatcagacaaccagttaaccagaggataaatataacgtttcttcctagccttcaaccaacaccaagacatcatttctagtcttccaaattccccacatcacagaaaaccaaattacttgaccttcatgtttcctgattcccaaacgctgagtaagccatcaaaattaaaaaaatgcatccatacctgattatgatttatagatataactcttagccagcacaaacaatcgaccacacctgagaaaagaaagagcagttatagaataaatgctcaatggttttcccctcttccctacaccccacacaaaaacattcctcaaccctcaaaatccctctgtgatacagattatttttactggaatacgatcctgcaccacagtccaaataagaataatcacatttaaagggagttttcttcccaaacttaatttttctaaatgcaaaaaaaagagtaggaataggtattcatgttggaaaagcctggatcaatagatttcctaataaaagcataaagaaaaaggaaggcttgttgaaaatggtagtgccattagaatttggtatgacagacattttttaatggacaaatcataatagaactactaaagcaccccagaacttcaaatgcccgactgaagtgcaaaattaggacagcagcaagcagcagcatgaacatgcaacattcatacacgaagaatacaagtttgaggacaattttttattagaagaagcaacataatctagcatttcacataaaccaggttatcagatatcccacagttctggcatttcaaggaaggagtttatatcaaactcgaagaatatacacttccaagaaccagtataataaaagtgaaaggtcctggatacaatttattttgaagttccaatgaaccaagtttatcaaatgtgcactatgtctcgtacctttgccacttctagttattcaagtaataattatttcgagagtccatcataacaaatacaatgaaaatactttcacgaagatgcaccaaattctcaattaacacaaacttggggtaccaggtaaaactgttaaaaccacttgtaaccaaccatgtccaaacaaaacactcgagaactttatatttctacccaaaacggtgtaatttacaattcattgttatttcattatgcagtgactttggcaacagcataacaagatttgacttggttttcattatgcagttcaacttattagttatttctcagttgccattgtaacattttaattttggttaacagaatacttgtggtaaaaaaatgcagaagtctgcgcatataccatcatttacaccatgaataaaaaaaatcaaacccaaattttacaccatgattacaaattccaggctgcacttcaataatcccatctacggtgcaccacgcctactgaatttttacaaaatgatttttaattcatatttaaaatttgttcatggcctaccatccagcatccaggttttccatcatgaatactattgtagctttcattagggttacaaaatcattccgtccagatttaaaatcttggaccaaagatacattcaacttgttgtagggtcattaaagctcaagattaacatctctttaaatgaagaatagagaatccttctcatagggacagctgcacttttccgttttaatggccggggtcatccttatagggttgttgtataccatgaattttcaaatgaataaagaagccatctcatagaagcaacagtacttttccaattcgagtcagggtcatccttataggttcatatacatttaaacgtgcagcttgatttaaaatcattcaacaaagattttaaacatacaacttgatttattagggtcattatggctaaaaattaacatctctttaaatgatgaataaagaatccatcacctagggaaaactgcacttttccaatttcaaggtcaaggtcttcattatagaatccatctcatagaagcaaccacacttttttgtttttagggtcagggtcagggtgaatcttctaggtaccttaatttttcagatgaagaataaagaattcacctcatagtggcaaccacacgtttcattctcagggtcaatcttatagggtttataaaccctaattttgcatatgatgggtaaagaatccaccacataggggcaaaacgtacttctttgttttcatggtcagggtcaaccttatagggtttatataccctattggtcatgagtcagaggctaccacacttttccattaaggaattcttctcatagagggtaccacactcatagaggctaccgcactttccgatttcagagtcagagggtcattcttagatatcaaaattttgcagacaatgaataaataatcatctcatagatgctaccacactttctgatttcaaagtcagagggtcatttttagataccaaaagttggcagatgatgaataaagaattcatttcatagagacaaccaaactttccgattacagggtcaggatcattcttacataccgaaattatgcaaaccatgaataaagatttcatctcatagaggcaaccacacttttccaattacagggtcaggatcaatcttatataccaaaattttgcagatgatgaatagagaattcatctgatagaggcaaccacactttccgattaaattttgcagatgacgaatagagaatatctcatagaggcaaccataattttccaaatacagggtcagggtcattcttatagagtttaaaaacccaaattttgcaaatgatgaataaagaattcatctcatataggcaaccacacttttccgattacagggtcaggatcaatcttatataccaaaattttgcagatgatgaatagagaattcatctcatagaggcaaccacactttccgattacaaggtcaggatcaatcttatataccaaaattttgcaaatgatgaatagagaatatctcatagacgcaaccataattttccgattacagggtcagggtcatttttatagagtttaaaaacccaaattttgcaaatgatgaataaagaattcatctcatataggcaaccgcactttccgattacagagtcaggatcaatcttatataccgaaattatgcagatgatgaatagagaattcatctcatagagacaaccacactttccgattacaggatcaagatcaatcttatataccaaaattttgtagatgatgaatagagaattcatctcatagaggcaaccacaattttccgattacagggtcagggtcaatcttatagggtttaaatacccaaatttgcaaatgatgaataaagaattcatctcatagcaggaactgaacttttccattttcagggacatgggcaacaagattgggctttcttgaataaacaaaaaaatgtatgacccaataggtaaaaatctgcaacagaaattccaaaatccaaaaatcgcggtttaaagaaaccccaatagcccaaataggtaaaaaaaactgcaacaaaaattccaaaatccaaaaaaaatcgcggtgtataaccaaataggtaaaaatcttcaacagaaattccaaaatccaaaaatcgcggtttaaagaaaccccaaaaatgtataacccaataggtaaaaatctgcaacatggtcacctttatagggcttataaaccctaattctgtagcaaacgaaggctttccctcaaaacactaatcatagctttgagacagaatgcgtttgcacgacgaaagacaccggtttcgtcaaataataaaaagaatttaacaagaaaagagaaagaaacgcattaaaaatttgaaaacctagagagagacattgcagtgatgagggccctgaaagatcacaagaaatcaaattccgacaattgagactgcttcatatcgcaagttatgccaaattgaactctacattcatcgatttcaaatcaagaagataacactggtttctattacctctctccctgtattcaacgattcgagtttcatcgaattatacagaacccattgacgaaacctgaaatcgttttagaaccgagaaactaactgttgatcgaatacgactctgtgtgatgcttatataaagacatcacccacgtttttttgcttttttcctcggacatatgggcctgggcccaagcccggattaactgtctatttaaaaactacgaggataacattggtaattgcctttcacggattatgtgaggataacgttgaatttggcctaaaatcggtattaaaaagtatttttaatccaaaatcagttttagaaatggtttctaattattttaaaatagagtaatatatatatatattcataactaaatattatgataattatattttatttcataatatatttttaatacaaataaatttatttttaaaatttatattttaatatacatatattaatattatatttattaaattcaataaatatattatatgtaacaaaaataatatatagtaatattattaaattaattatatattatactcaataaatatactaatttatactatataggacgctaccgatgtatttaaatatttataaaaaatactatattaataaactcaattgaaagctatcttattacttttatttaattttattttactaatacatgtatatatatgcatatatattatttgtaattttattattttagaatacattttatgaaaataaaattttaaaatttatttttaaatatataatgaagtttatgaaaaatataatattttctagcataataattaaaggtagaattaggagttaaattgttattataataataaaatatatgcaattgaataaaatatttaaattaataaaataaatttgatgagttatttttaaataataataataattaaaattgtgtgtatatatatatatatgtgtgtatgtgtgtataataaaatgtaatatattttcaattgttaaggaaggataatgtactgtatttcacataggaagggaatgcagagtagaatttgaatctttaaaggagtgataatatatagcgtaaaagatgctttaggaataatgttttgaacataagttttggtggtcaggtaagtcctcttatttattttgtataaagatgatttggttttatttattttactatttttttaagtcttcttcatttgtttgtgttattttgtgttattaattttttagttcgtatgtcagtaggagaacataataggaaatattttgttattttttagtttgcagaataaaaaatgatgtaggaaatatttgtttccatgttttagtatgatgcagtttttaattgtttttagaaaatgatagtagaagatatttttttacatattttgagtttgcaaaaaaaatgaaaaaaaagaagataatagaaaatatatattgacattttcttagtttgtattttaaaatataatagaaaatatttgtttccattttgttactttgtagaaaaattattgttggcgtttttttatttgtagaaaataaaatatagttgtataaaaatcaaatttaatacaaatttaatgttgtgatttttctactttgcaaaaaaaatatagttgtagaaaaaatatgtacaaattcaatagaaaattattgttggcatttttttagtttgtagaaaaaaaattaatagaaaattattgttggcaattttttactttgtagaaaaaatatagttgtataaaaattaaatttaatgttgtgatgtttctactttgtagaaaaataaatatagctttagaaaaaatatgttatagaaaaatattgttgtcatgttagtttgttaggggggaaatagttttagaaaaaaagaatacaaaattaatgttggcactttttaagtttgtagaaaaaatatagttgtacaaaaattaaatttagtacaaatttaatgttgtgattttgctactttgtaggaaaaagtatggttttagaaaaaaaataggttattgaaaattattattgttattttgtagaaaaaaaaatattaaaataataattaccaatttgttttgatgaaatttcagtgtttaatataatttttatggtgaaagttttagttgtacacccccacacacgtaatccttcattgctataattgcagggatgcatgtgtggaagttggaaatagtggccaaagtgctacatttaaaaaaaaaatctcaaaatgccacgaatgtcataaaatttattaaaatgtcatgtcacctaatttgctggccacataagcgaagttcatgagctgatgtggcgttgaattattggaagaacaaatttcgctacacagagtaacgaattatatatgacacgtgacaaaaaattcaaaattgcgtataaatttcgaacggttataacttttgacttgaacgtccgattgaggcaaaatcggtggtcaaatgctcgaaatcggtggccaaatgctcgaaatttgcccagggcttctcctataaatttcaagtatttgaccatcgatttcatctcaatcgaacgttacagtcaaaagttatggtcgttcgaagtttatacgcaattttgaattttttgtcacgtgtcatacataattcgctactctatgtagcaaaatagatcttccaataattgaacgccacgtcaaccgtagacttcgtttatgtgactaaggaattaggtggtgtgacatattggcaaattttataacatccacgacattctgaaattttttttttttaaatgtggcactttggtcattattccctgtataactcaaaagctgtgagacctacgcgctagccaacagcgccaccacctcatcttattactaatgtgtttagttagtaattagcctagatgttgtgttgttcattgggagagtatgtttaaaaatgaaaattacagtaaataatactattttgttggggtaaatacttcagcgcacatattagaagtccttccaactataactgttttctccttgttattttctcttatcctaaaactaaaatgtttagttttttcccctatcaaataaagaatctaatggtcttatatattgaaagtaaaactttcatttaataaaaaaaattattgttaatattttttataaagtatttattataaaaattaataaacttatcatgaataagatgagaattgtgattgaatgacatttagattattattacatgaccattaaattcaaaagtaaaaatatgtttgtaagaaacaaaatttagaaaagtttgcattattctttgattactatgtgatgtttattttcttaccctatttagaattttaaattataaaaacctaataattaactatctagattttagatgaagaagttctagtgttgtgattaaagacaattatcatcaataatctttaataagtcacaatcattctagtcataattaccaccgtcattagcactacacaataaccatcatcattctaatcaccatcattatctgttaatattatgattattgttaccattacagttatcatgtcatattatcatattattgtcacaaatctatcattagtgttattaagttctcctcctcttttgttttgcttccatcattacctctatcatcaattttaaaaccacaaaaattgaagctaaaaattgaaaaaaaatgatttttttttataattttcaaaaatttaaaactgacaattataatgaagagttttttttttttttttacacaaagagaagaaaaatgaaaagaacaaaaatacaatcttaaataaggatgccataagagtctaatctattttagtgatcgatatttttttttaaagaatgcatcaaaatgaaatacaactgtctctgtgttgaaaatactaaaaaaaatgaaactgtgcacaattgcaattgtccgataaacaaaattacatgacactttaaaaaaaaatatatatatatatatatatattatatatcatagtataattttgatatgtggcacttatacggttaattgtgaaaattactaaaggttaactataattaagctcacttctataaaaaggggtggtggtacagttggctagcttaggtttcatagctgctgagttatcttgaggttagttctcgagcctctctcatctcacttttttcaaactgtttatatgtttaaaattttgggagaattgatttattatttagaaaacaaggaaatataataaactattacgactgttttaaatacatattctgaataaaataacttttttttttcctttgcaaacatgtagactcctcaaacttcaaacaacctttccattgcaatgctactagcattcagcatatcagtccttccattaacgatgacaaattaatccctaactacctaaaaaaatacgaacgtatatcacaaaaggagacatgaatagaatcagaagaaccgttgatgtcattcttgtgttttgttattagacgattgagacttgagagtccgaaagacacttacattcggaacccattaaatttgagggtgaacattcatattaagttctttgctgatttttccttcctttcttatttttatggcgaaagcaaacttatcctaactaaaatatcacaattttcttgcattgaacatgatgaattgtcaaaggaaatatctggcaagcattacaatttaatgagaaaaacacaaacaatagattatggtctttaatatatcttgcaaagaattgttgtcacattttgatttgcacgtatacatcatccgctgtcaattaatatatggaaaaaatgtttttttttttaaagagagatcttaaccttgtcgtaaacatcaaatatttcaatccattttcctgatagaaaccactgcagggcagctaaaatagcaacatttccaaggcacaaggaaatcttctatttagcagctactacatcttgaagtagtaattccaaatctttcaatctgcatgatggttcacaaaattttagtagctgagtctaaatgaacaaaatctaataccttcagttgttagctatgccttataccttacgttactcaagtcagggtagattgctatggcttctttgaaatcctacattagatccaaaatataatacaggtacatcatcgtgcagccagtttaagtggatagtaattcccctccatgttcaatatcaaattaatctgcagattcttgttgaatttgtttgaaagttaacttaactgcctcacctgttctgctgtggaaggtgtgtaggtaaccacgcatgacatccctgcttgtgttgctgcctatagaggttaatttagatcagatgatagtttcagcatttttgttagttaaataacaagattaaatgcaatttggtgaattaaggaacaaaatgaagattctgtaattgaaattccatatgtctaggctcatctattgatattgttatgtctaataatacacaaagacaactccttgcccttagactttctaacccaagctcatctagtccgttttcttctcttcttaaacagcatataccatataattagattggttatatctcaaaatatagaaaattgaaaacacgagaaaatctacctgcaatccaataacactatcctctacaaccaagcagtctttctctgatatacctagcttctgcaatgctcatgtaaattatgctcactcggttagtgcataaaataaatttaaaacttcatgtttcaaagtttttgatcatattgtcataataaaaccttggaagctgtcacgtatattgatgggtcaggcttcttttccttcacatcatcacctggaagtttaaataaatgaacagatgaggagttataagattgacttggtggttgaagcgagaagggaggggggaggttgtgggttcaaatccctcccactaacaaaactaacaactaacatttatcgataaaaaacaaaaataaatggacagacagatttaaactcaaatacccaaagtactgccacataaaaatatcaataaaatttgcaagctgagtggtggatgttaacaactaggaaaagtggaaaaccttttctacacatgtataatagaactaatgttatgagaatgtgttatccaattttcttataggatgaaaaaataaacatagatgaaaattaattttgagttttgatgcttcagagggcgctgcagcatggtgtaagttttgtttcacaatacttgagcaggaaacatatgtctcgaatgttatatgaccaataaaaggatatataccagcaaggaagcaatcaaggccttgaaagcgctcctacaacagagaaaataactgggttgagtgcaaattaataaataatttctactcccaatagtgacaatgggcttacaattcctataaggttttcaagacagagaataactgaacttttagtcgctgcggagcaaacagctagctttttcccctgcaacaacaatttggcaaaaaatgacaaacttaaaagataatccctaactaacataaaatatgagttataacaataaccgaaacagctcagattgaagacatcccatcagaagcaaagcaagtaatacattaggtaatgaaactgaaactagagatcagtgcagtgctagaacatatatatcattatcttactgcatctctggcctcatccatcaatctcagaactccaggtctgggttttacctgtgccaaaatgtatgagtatttaacagtagcataccaacaattcagataccaatttcacagtataggagtccactcacagttcctgacttgattatttctttgtatctctcagtcttccaatcctacatgatcaataccaggaaaatgcaatgacatcatattccaaatgaaatgacaattgaaagggtcttcaatggttaaacatcaaaatatgacattcatgcatgcataaatttgatttgccctctcaaaatagttgaaaaggaataagaagcaattctcatgagcatggttttgctagttctctttttcattaacgaaggaaggaaataaacatctctagttctcatactttgggaatcttctatatgcaaatggaatagccaaaaagaaaagaaaaaaagaaataatggcaacgaactcgttaactccatttttccacactaggatggggtaaaattccatgttcaaaagcttatgattggatgtcagtctaaaaagcttctatattgttaatccattctaattaaattctaaaaagtaacaagggctagagccaagttcagaagactgagtgacattcatattatgagaaacttaataactgaattacgaagcacctaaactaataaccacgtaatgaagcaatgtgggttctaagattggcttagtggtaaagggagaagggggcggaagagatcatgcgttcaaatcccaactaataaaaactaacaattaacatttatggattaaaaaaaaatgtacggaagctaatgcaatatatatacactaacttactctgagtgctaaagacagacaaaggaaaaaggtaagaaagacataaatacctgaagagtgttaatcaacttggcccgatcctcatcattaatgggaggcgtctcgaacaacgtggacgtaggccacccgtgttccttaaagtaccttaaacgaacacaatcacacgataagtaagtaaactccaacagcagaacataaagataaacaaaagaacaaaacagagaaccatcgcattttgggtttgcctccaccaatgaggttctggagttcgtcgtagaattgaacgtcccagttgagtgggcccggagaagaagaagaggggcagcgaacgttgaagtgaacgaaggcatcgttgtaggcttggcgatgcaggtgctcagactcgaggatcacgccgtcgcagtcgaatatgagagcctgaagcgaatttgaagtggaagcagaagctgagacggagaaggagcggtgcttgaaggagaataactttattctgggacatgaaaaccggtgtttggtgttgggaagataggagtaggaggtggtggcggagaggctgagagtgagggcgagtgtagaagaagccatgtgaagtcccacaccgctagccgttcttcaccacatccatcactttagtgagtcatcactctttctattctggtttgtgtggctgtgcattctcattctcctacctatttcttcacaacttctaatctcttttcttttaccaatttttgttgccatttctctgccactaatcactctttcatacacagctaattttgttttttttaaagaaaaaaaacagtggaaagggtggattaatgttttaaatttgagttaaatcagagatgatctgaaattatgtacatattaaaacaaaatttaaaaatgtatacgttaagtttataaataaaatcataaaaaactgagaaatatattttactttttttttagcaaaacttgttttttttataaatataatgcatatttgtattattgttcaattgtttaaaccgactaagatcggtatagtaataagagatttagatattctatataaagtcatatcttccaatctcctttcttacttatgcatcaaaaggatagcctatatatctaacagccactttctcaaaaaatttcttctattaaataaaatttgtatgggtcacattaaaggttagtcctgtttcccatttactagtgccaacatatgagtaagtagaagggaggaagtaaaagttttggttgtaaactggaaccattctgttatataattgattgcttctgttaatctcactacacatattaataagaagtaaatcagttgaggttaagtttcgagttttgtttataactatttgcaatctttttgctagagtgattgattctaaaacaattgacaaaattttcatgaggtctggagcatgtgagaaggcaggatgggatgtcttgtgtaccgagtgattcccaatgaaccatggaaagagtcaaacttttatgacattactctgtagatcttttgccagcaaaatgagttgtaacttgtaagtgatgcaaaaaacctcattccaaaagaagaattttgccattctttagttgagaagagaaataaattgtaatattaacaagatggtagttatggcagcacgtggaattccacactttcttgtatctgagccaattaagctactctacgctcagaaacatatggtaacacgatgcttaatatcaaaacaaagtgccccattctttaccagtctccaaacaaattttctagccaaacattcctagctcattctgtttttattgcttaactaggccaccagttccttcatctctactcaaaaatagaaatagaattttcatgtttttatttgacgaaagtaattgttctcaatattttcctgatcaataattcagataaatagtcgtacattgtttatggcacatggaagtataaagatttcccattttacacatcttgtacattattcaaattatcatcactaactctacataaaaacaaattcatcagtattttccagcaaaatatctccaagttccattcttccatgaatcattttgcaagatcttttcctgattcctcatcaactttcttctccattttcctctccttgcaatcagaaaagtaaatcatgcacgacacccatttcagtgtatttaacacagtgaggagcccaatttgaacaaatatcccgtaccctcctttatagcatccaagggagacacatgacaaccttaaacaaagtcccaaagcaaagaaaacaagcatcaaaagtagtcctctcttctgattaccactgctgaggtaatacgaaactcgcaaagccccaatacgatatataccatccacaactgatatcacaaaactcatattccagatagcactccattccaaatataccatcaatagctttgcaagtgctacatagcaaattaccgcaaataatatgtagaaaccaaaacccctgaagaaaatataacagttatttactgtccatgggaatgcaatcaagagacaagataaccaaaagagcatatacaaagaagttataaatgtgcctttcattattgatatgtcaatggatcttttaaacatatccttgagactaatgttattctcttctgagcgcagctttgaagccgaatccatagttacaaccgcagacgcagagcagagccctagaacatgaagaggcaccaagtaaatgaatccaagttgaatcaaaacaggcaaataatcctcactaaaacttttaccaggtgtgtcgacgaccccataaatgtgaggatgatatgcaaaatgataatatagattatttcgttccttaaaaggtagaagtgatataatttctggggtctcaaccatagtttggtggagcaaagtttcaaagtaaaccatgattattgaatctttatgtgatctcacctagttttgcttgttaaagttttctctcctaatgagttctcaggtaagtcataatctgtaaatatacagagcatatgaccatttctatactagcataaagctccgttgatgagtcatagattatgttagtaaatatatggaactaagttcaatagttcatactctgatttgcttgggcaaaaaaatggttcttctattgaaaccttagtcttaaaaggatagcccaagcatcctcatctcgagaactagcttgcaccaacttcacgtttgtcatatttttgggaccaacctgctaagtgcaaacacagttcaagtaccccaaaaagacaacaaaaattcagtttaattaaactcagaatgctcaaatgcttaaattgggtaagctagttgctaattgtggcctaatagagatcccaaggaactaagtggcaaaaataccagttggagtgggcttttaaaccatgattttttcctacaattttgtatcaccagaccaagtttaacttccaaatttgaggttaaaagaactagtgtaactcaatttaaacccaagtcttaatatgttgtgatgctatcccttttcactaagactcatgccaaaattacccgtactcataggtgctggggtgtgaacgaagaaatcttttgaattttaaggaaaaaaacattcatgaaattcatgtctaaacattgaatatttggaaaccagtgaagaatgagcaccttgttttgatgtttggcgtggtgttatcagaagtttctgagcatacagtaacttgattggctcagatacaagatggaatagagttccttgtgccctaactaccatcttgtcaatttcacaaatttatctatcctcaaatgaagaatgacaagatacttctctcggcggtttccttctcttccctggccctctacattttgatcctcagtgtatgagattaaataagtgaactgattaattcattcatacactgaagcatctcttattattttatagtataacgtaatccttctaacaaacagcaaaaaaaaaaaaaaaaaagaagagattctctatccttaaatgtttatcttattctgtgattttattttgcaatgttcaaaatttttgcaaacatgactcagctcagcaccttccaaattccagctcagcattataattcgctttccaaaagataaaatgaataccaacaccccaattcgataaaaattgacaaacatccaacaagatagcactataagtatgagtattatagctgcatgctcaatgaagttaatggatttttagagaatattattgtccagcacaattctttcaaaatgtagtcgtacatgaggttccatttattagttagtaaatctggattcagacggtccaaagatttttctctagaaaactttgaagattcaaagcaactataatttattttacagaccctgtcacaattgagagataaatttctggtctttgccgaagtggctttgttcctgtctactatgcacagtctcaagactcaatatgttgtgatgatgttgtcccttttcattcaaactcatctatcaaaatgaccagtattatgcattaagcaacaagcttgaaccaagctatctcaacttcattaattgtggttgatggcatccattatccgtagtatttgttagacttggatggttgctggtcgaccaaacaaatactgtcctataaggactacaaaaacaagaagactgacagtgtaacaaaataccacatcgctcaagagaaataacaagcgctgaagactaaactataaaaaatgcattattccattgtacaaagcatacctttctcggccttttggctaagatcaagtgtatgttggtgattttagtgtcatcaatggattttagtagtaatgtgatttactataggccaatgctattacgcgttaagctttggaaacaagttagggtagtgcggagtgcacgcttgttgagccaacgcataattgatcgcgattacggtgcggggttccgagttttgtttaaattctatgagttatgaataagaggcggttaacaattcaaaatagtaactacttataaccgctcttgggaaaggttagagaaataactactcccaaccgctccgataaccaacggttacgatggtttatcgccaagagttgtattgtttggaaaactcctatataaggagtcatttggcctcagatttgatatatacgaaaatcatactttctctctacattcctgatctgttctctattgccagaagcagattgttcttcaaagaattatcccaacaaggatttcgtgaacccaggcaagaatagggtcgaaatactttgtttggaaagtgtacgaacacgattctttgaatttatccaggattatcatataattttctaacaaacgaacaaagtattttctgataatcatggatggaggaagcgttggaggaagcatagtcaaggacatgactactaatttcggaaagttggacaagtttcaaggacaagacttcaggcgttggcagaagaagatgcatttcatgttgacaacattgaaggtggtgtacgtcttatatactccgattccagaaattcttgaggaagataccgttgaaaatataaggcgcagatcaaagtgggagaacgacgactacatatgcagaggacacattcttaacggtatgtctgatcccttatttgatatttatcaaaatgtagaatctgcaaaggaattgtgggattgtctcgaatccaagtacatggcagaggactcgtccagtaaaaagtttctggtgactgatttcaacaattacaagatggttgaatcaaggtctgtcatggaacaattcaatgaactcctccgaatccttggacaattcacacaacatggattgaagatggatgaaacaatatctgtctcaagtatcatagacaagttgcctccttcatggaaggatttcaaacacaatttgaagcatggaaaagatgacttgtctctggttcaacttggaagtcacttgcgcatagaagaatctctaagggcgctggagggtgacaagggaaaaggaaaagaagttgctggaccctcggttaatatgatcgaagagggcggtaagaacaataacaatagaaacaaaggaaagaagcgtgctttcaagaacaccaaaggaaatttcggttccaaactgaaaccaaaactagaatgttggaagtgtggtaaaacaggtcacttcaagaaggattgccgttatgggaaaaaacacaataacgcgaatgcaagtggttcgggaaaagggtctaaggaccaatcccaaaacgaaggtcagaaatcaacttgtgatttgaattgttttattaaacattcggtttcactaatttctgaagcattttatgtgaaggatgatgctatcgcgtggtggattgattctggcgccacaacacatgtttgcaaggatcgtttctggttcaagacttttgttccagtggaagatggttctgtcctctacatgggagatcatcattttgatcctattgaaggcaaaggaagcgtggtgttagaattcagttctggaaaaactattactttgtttaatgttgtatatgttcctaaattacgtaagaacttaatttctggtcctgtattaaataagcttggatacaagcaagtgtttgaatccgataaatttgtattatcaaagtctggtgtgtttgtaggatttggatattataataatggtatgtttatgatgaatttgaatggagttcctaatgattctggttctgtatttatgtctatttcgaatgttatcaattcgtctttatggcatgctcgtctaggacatgtacattataaaagaatgcgtgaaatgtctaaagatgatttaatacctgtttttgatgagaatatagaaaagtgtaaaacttgcatgttaaccaagatcactaggcaaccttttaaaaatataacaaggaaatccgttatacttgaattaatacatagtgacttatgtgatttgcatgctactccatcattaggacataaaaagtattttatcactttcatagatgatgcatctagattctgctatgtttacttgttgcatgctaaggacgaagctttagataaattcaaaatttataaaactgaagttgaactgcaacaagatgtgaagattaaaacattgcgaacagatagaggtggtgaatattatgatcctgcattcttccaatccgtagggatcattcatgagactacggcaccttatacacctcaacaaaatggtgtggctgaaaggaagaatagagctcttaaagaaatggtgaatgccatgttatcttactctggtttgagtgaagggttttggggagaagccatgttaacggcttgctatttgttaaatagggttcctaataaaaggaataagactaccccatatgaactttggtataagaaacgacctaacttaacatttctacgtgtttggggttgcagggccgtggttagactcccagaccctaaaaggaaaactttgggtgaaaagggtgttgcttgcatctttgttggatatgctgagcattccaaggcttataggttttatgttatagaacctaatgactcgatttctattaatacaattatagaatcaagagatgctatatttgatgagaattgcttctcttttacgcctagaccaaagaactctataccgattttggatgaatctctaaaggatgatcacttaaatgatgtaccaagtgagacaatcgaacctcgtagaagcaaaagagctagaaaatctaaatcttatggttctgattttcaattatatttagttgaaggatcaaaggattagattgatgcacaatactattattgttataatatagaggaggatccaagaacgtatgatgaagctatgaaatctcgagattctgttttttggaaagaagcaattgacgaagagattggttctatcatggaaaacaatacttggatattatctgatttaccaccaggttgtaaacctttgggttgcagatggatcttcaaaaggaagatgaaagtcgatggtacaattgacaaatttaaagctagattggttattcaaggctttagacaaaaagaagggattgactactttgatacctatgctccagttgctcgtatcactacaattagattgttgattgccttggcggcaattctcaatttagtgattcatcaaatggatgtcaaaacagcattcctgaatggtgatttggaagaagaagtgtatatgaagcaacctgaaggacttgtaatgcctggcaatgagcataaggtgtgtaagctagttaagtcgttgtatgggctgaaacaagctccgaagcagtggcatcaaaagtttgatgagattgttttgtctagtggtttcattctaaaccaagctgacaaatgtgtatatagcaagtttgataaatccggtaaaggagttatcatttgtttatatgttgatgacatgttgatctttggcaccgaccaaaatcaagttaataatacgaagaattttttgtcatcaaagttctccatgaaggatatgggagaagcagacgttatccttggtattaagattaaacgggaaaataaggggattgttattacacaatctcattacattgagtttgttcggtcgcaacaaaacttagctgatcacttgacgaaggggttagctagagacttagtaaagaagtcggtaatagggatgggattaaagtccatttaaatattctaattatgatatacccaattcccttctaatacaacgttagaagcagaattcaatgtggaaagattatagttagaaattggagcaattatgtttgtcttcccaaggcatttgctcagaccagcaagtgatggttaggttgaagtatatcttcttaatggttcttttgaaaaattgtaaatgctggtacaagattaaaaggatcacctatgtgagcatgaagttttgccgcttcaagaagtttggatttggcttcctatatgcttacgaatggataaggacacatggcttgtaaagtgtcaagtatgaatagtagagtgttgtagaaaacatatgtgtacaatatcttcagatattcaaataggttgacgggttcaatcgtaacgataccctgattcttgagtatatggaatgtgtatttgtactaagatgaaattcaatcgcaagacatttcatttatgcatttgtttgatcgttatactgagtagatcaaggattacactaaaatgggggggatttgttggtgattttagtgtcatcaatggattttagtagtaatgtgatttactatagaccaatgctattacgcgttaagctttggaaacaagttagggtagtgcggagtgcacgcttgttgagccaacgcataattgaccgcgattacggtgcggggttccgagttttgtttaaactctatgagttatgaataagaggcggttaacaattcaaaatagtaactacttataaccgctcttgggaaaggttagagaaataactactcccaaccgctccgataaccaacggttacgatggtttatcgccaagagttgcattgtttggaaaactcctatataaggagtcatttggcctcagatttgatatatacgaaaatcatactttctctctacattcctgatctgttctctattgccagaagcagattgttcttcaaagaattatcccaacaagaatttcgtgaacccaggcaagaatagggtcgaaatactttgttcgaaaagtgtacgaacacgattctttgaatttatccaggattatcatataattttctaacagtgtagtatctgttcttatcagtttaatatatgatatgtggtcataagttcacatgataataaatttattttttgaggggagggtctgctacagtagcttgctattggggctctcatttgtcgcccaagcgttgcaatactgcacaggcatggcacaccccatcaaaccagtttctagtattttgaagagtattgcattttttacaacttggtatagactatctgagggaatgtcaataagcatagtaaattgtattttcattttggtattagttgtggttctgccaagaatttccgtaaggaaaatgttaaccgaaggttgcgttttttctaatagaaagctgtatctaaattgcgttacgaaaatatagcggacgtgacatatgagtgtttctaagcaccaacttgagtagtgacttgcaccaactccacatttgtaataattttgggaccaagctgcaaacatagttcaagtacccccaaaaagaacatgtctgctaaatttcagtttaatcaaaattcagaatgcctaaaatagatactaacttgcagatatcccagttggcctaaaacacaggaaaccgtcctagaaactagaaagaaattgtttctaaacctttatagaggacaattacaacatcgatgtgggactttctagtccagtagagtaaattttgtgttaaaattatttaactggcgtggaactaccaataaacattttaaaaccatttgacaatcttgaaccgaaagtagctccttcgtctgggatcatacagagatttgtaatcagtctcaagactgaccctttcaaaagacaattctgatgcaactcccaacacatggctccaccctccttagtttcgtagcagaaactgtatagcattattgcagctgctagaatttcttcgtaaaatgcactcgaattgtgtaccttgcccagcctggacagaagcatgcatattggcctgtgtatttggctgaggtggttccaatctaacgctggcttcttttgttacttaatagccattggttgcgtctgtaccgttagctgccctgtgaagacttggtacaaatatttggtttgcctaaaatttagtgtgtgaacattgagttaatatcaaaatatgtaataaatttaatatataaaatatctattaaaataattaactttattatgagttacttctatgagttttttttttctttctgaattttctgggcaagaagcaccccctgacagagttatttcattcaaagagaggcatttgataaaaaaaacattaatgatctgtttggtataatatatacatatatatatatataatttctatacttcctttgaatcttatctttagttcttgaattttcatatcatataatttagtctttaaattttatgaataaacgtgttttttataatttccttaagtattaatggctaattaagtcccacaatgcaaaattccccttctcacatgggaagaaagcagcagaaatactaaaatccttctctctccttctctccttgctgcaagcctacatacatgcctttcccatgcctccacattagttaaccgattatgtaaaaagcataataggttatgcccatttaattattgtataataacaacaacaataatattttttaaaataattataactaacaataaatataaggcaaatatataatttgtatcttcctatttttttaaatttacaattttagttctcacattttttaattgaaatattttatcaatcattttttaatttaaaatttattattttaatccttataaacaatttcaaatattgatatatgtattctattaatgttgattaatacatgtctgtttattagtcacttgacaaatgttttttttttaaattatttcattattgaattgcttaatttattaaaaaataatttaaaaagtacacaatcaaaatttaaatttgatcctagaaattaaaattgtaaattttttaaatataaagaaaaaatgtctcaattaaaaaaatgaaaaatatgtctcaattaaaaaattgaaaaatttaaaattatgaattttaaaaaataaggaacgaaaattatattttagtctaatataatatgaataataaaaataaaataaataataataatagataaaaatgaatctattaatttttttactctatttttatttaaccaaataaccaaacaacatctatttttttatctatcacttttattctttctatttttttctctcacaaccaagttgaaatggattggtacattaaatgccacaatattaatagatacccaaagtgtcggtggattcagtcccgactattaataggttggtaggttggtagcttaaaaactcacatgataaaacttttctttgtatgggtaacatttatattattgtcggttaattttttaacttaaaaataaatttttcaatttaataaaacgtttttaattaacatttttttattataaaacacgttttttatcatttaatttaaaaacttgataatatgatatgagaaatttgatataaattgtatcatgtaaagtgtcctctactacagcgaattggacttggatgagacatgatattttcattcaattaattagcctctgaaaaccaaattgcttgaataataactactgagtaataaaaaatacaccttggacccatcgtacccgttactcaatagtaatactcataatttgtagtggctgatcatgtatacagaaacggatttttaattctctaccttgtccctctctttttcttttttttctacggatatcctttcaaagtcatttctattcaagcctgaatttaatattttcgaatcaatcaaatctctaaataggatttgaacctacgattaatcagttaacagttgaccactttatcattgatttattgagaaacaattgaaaattcgaactaattcagattatcaacccaaaatcaatatgacttccaaatttccttcctggtaagacttcttcatatatctttttcatcaaatcttagttcactatattatgaatgactaatttttttgctgaatctaactttcgttgactctcttaacgaattattttaagggaccaacataattaagtgatgtttaactactcaaaatccaaaattacactttgtaaaacaatatttttttttaagaattaagtaaaacaatatattcaagcaaattcaaacataaatttataaaactaaacaaaatatattgtattttgataataaataataattaaactctataataagcataattaacattaacattaacatcaatagcatctttaaatcaagttaattgagattagtgatagatgaacctaataatagattataaataacagaaaaaaattaattgagaaggaaagaaaaaggaaaaataagacaaaaaaaataaactaaaagaaaaaaagaatgaaaggagaaagaaggaaataaagagaataaaattaacctttataatataactagcataatatatttttaaattattaacctaatgtattttcatttacttcctactaaatttttcaatactaaattttccaataattacaaagaccacatttttgcttattttttaagtgcaacagctgcactcttttctttcagtttctttttcaaggtaataactgtagcctaacaattcaagaagcattctcctctcatttctttacagtaacatagcatccacacccattctcgtttcttcatagtgattgaaacttgaatctatgaaactttgaaaacttccgtaccttctcagtaaaattctgtactagtagtgtcacttttgcaattacttcatatttttcactagtatatttaatatatcatgatgttgtcttgaactaatttatatcagcgccttaatcttatatataacattcatatataattttaattagaatgaatagtcatttttgtttttgttgtgtaaaacatcgataaattcattcctgaaatgtgtatattcaaattttagtttcaaaatagaaaaagtgtaacaactttatttaactattaattttcgtccgttatcgttaatgaaatgaaatagtatacgtgatatattcaaaaaacgaatttgtcaatgctctacatataattagggacaaaaatgattttttatccaaaatattatttaatattcatcttcctcccttttttaatcattaaaaaaataatattataataaatactttaaaaaaatagaaaatcacacataaattagaacaaataaataataaatataatctatttgttgctctgaaattgttattatgacacgattagataatgacaaaatcaaattagatctcattttttgtaaaaattaacttaatgattatgcatttttatttgagtctcatatttgaaataatatacccgttgcttcaaaaacttcaaaataatagacaaattatacttattaataaatattatgcttattattatatttgttttaacttatacttatttttctattttttaagtatttattgtagtattatgtttgtaaagattaagaaaaaaataaaaaaataaaaattaaattatattttggataaataatcatttttaatcctaaatataaaagatactaacaaacttaatcttaaactctttcattaacaatatcatacaaaagttaacaaataaataaatttgtcatatttttaaatttttagagactaaaatttaaattttcttagaagcgaatttatcaatattttacatattcaataacaaaaataattatttaatcttttaattacaaagagggaatcatgtgttaaaacagtaaatacatataataagaaaaaactttggggcccatgactcctccgccaagtgaagatccgcaactgctgttaggcaagatttctaattcgaaatttgcaaatgaaaaaaagaaattgaaaggagagacaaagattgatcatccacagaagatgtgaatattttgtataaataagatggtaactccaaaaaacctataatttaaacatatataatattaaaatgaggtcaatatattttattttataaataaagtattcatatttggttaatttttttgttagttcactaattgtaaagttacttctaattaagaatgaacttagataaattaatttatatatcaataaatcgttggtgtggatagttaaatttagtctttttaaataaaatatttaaaatcaaattaaaaaaaatgtgattaagagaagaaaagttgaccactaaatatgatcacttaaattttctaataaagattaatcatcaataaaatagataaatattttatatcactaacataattaacaaaaaaattaatttatatttaaaaattactcattaatttaaaaatagtttgacaatatttaaaaaaaaaaatcaatacagagaaatcttttgctctaataacacttaagaatgagtaaacagacaaggtggggggcgggatcactcataggaccacgagacacataaaaacaacggtgtgaacatgtaccatctcgcaggcaatgaaaattccaagttaggcgaaaaggttatgacttatgagacagattcgcactataataggttccaaaaaccaaaaagaaatcagggaaaagaaaagacatttgcaatggacaagacataacacaacccctcttgctatctgttcttgtttgacattgctccgacctctaatcctcgtgcatctcatccgaggtatattatctggtttggtgcttaatggtctgtcatgattttgtgcttaaaagacaccttctaagaataaaaccgtgaaggaccattttgtgcttaaaaaacatcttttaaggataaaaccgtgaaggaccattgagcatcaaaatgaagaataactcaaataatatgatcctaacagacacaaaagcaggaacaggtaactttctcaaaattaagatgcaacagaataaagttgaaattcatgaggtctgtaacaaactctgtacaagtatcaagctctaatgtataggatccatgctgacgtacgcaaatctgttaccctagctgaccactaagccacaaatattaaaatttaaccaacaaaaaataagagggtcattttacaaatttctaggggttgaagaagtggtcaccacaatggcatttccaccccaatggcttgtaattggagtacctgttgccttggggagaagaagggttaagaaaacttgccatcgcagcagttttggtaagatctggaggattagagtcatggcttggcaaagttggcacttgaactgccatgcatggatggcaatcattgcacttgttgtgacagctgggaggaattgaacctagcctgtttttctcctcaaataacagttcctgcacataacaaacaaaccacattaattttgtacataccctccattattagaccatgtacacatacacatacacacttgaagcagttataatataaacaaacatggcttagactaaagcttacccttggagaaattgcagactgagggtgattggaggcagaaactagagatagagagagcaaattatggagaagaagtataatgagcaaggaggcgattgtgtagtaatgatatgaattaagtgcagccatgaatgcatatgatcatgtcaccaccccttgaagtcattccccatctaaaagagaaaactagcttgggtggtaaaatttaatgcgagttaactgagatccgaatgccaatcctctgaaggaactttatcaggttgtgatgtgaagaagaacccaaccaagagagagaaagagagacagagagagagaaaagatcaaaactcaaaaggaagaaggctttttactctattattttccagtgtagagtagtgcttttcttctcatggcgtatagcctgaagaatgaggagaagagaggtacataaattggaagatgtgttggcagcaatagcaagcaagtagagagagagaaagagtgcagtgcagaatgcagactgtagcagaaaaagtgaaaggaacgactcgagagggttaagcaaattgggagaatccacatcagtatcaaggggcccccttggacagtgttctataagtagtttgagggcttgagactttgagcctggttattagaaactgcgtggataacaaatggccttgtcctttctgtgtgcttaaaaatatcacagacaagaggggatagttcaaactggcatttattatgctaactaatttttgtctcagttttcagtttagcgatttatctatttgactgtgattgactttgattactttacttacacctgattatggcggctagtgcaagtaatttgtgtgctttgtctttgttaatgctatagaaaaatgtggtgtaaactcaggaattatttgagggtgaatctgattataatgataaagttatattttaataatttattgattataaatttaaatttaaaaataattttttacatatataaaattataatatctttttttcttatattgtacaacgtagaacattgcataatggaatcactagtcttttaaactaacgaatcaatcaaatggaggactttggattttttgcatgtaaagtatgaattactgttactgacccctcaagtttgtatattgtacagaggacaatgaaattgaatgattaagtacgggtatttattgcctattttctttcaaatagaacttctccagaagtggtcccatagttaatactcttgttaagttgatttgaaaggtacctgttactccttaaaaaaaaaagttattggatcaaatggtttcatatttaaattttttaattaaggttcaaagtttaatctataacttaaatataaaattatagttaaagatatcactttatctcaaaataagatgatccaataatgaaagataattagttagataataaataaaaaatctacagttaaatcaaaactcatttcatttaacttcttaatccaaaacggaattatatgcctaagatatacataattatttgtaatcacaattaggaaaatggtgtcgacattttttctgctgcaaaaataattgagaccaaaatgccttaattccgtattaaactgttgaaatctaaagtatattattatttagtggcgtgtggggattcatttaaaaatatatggaagtgtaaaactttgttaaaaagatttacacaataagaatcaatttgaaaaattaatgaaataatgataacaacaattgcatttttttcttgctttgatgcttttgtgtaacaccatcacttttagtacataggttattgttgaaaattcccatacattcaaacacacattttaacataagctgtttataaactttctaaaattgatctagcacacatcaagaaagcatttcacaccaaatgagtttcagggcatgtgaaactattctcgtttcagtttccttttcgaggtttcgggattccttgcagtgactctacagctttcaattagtcaaagctgccattagagtattgacattgcactgagagggattgtgactgtgtgagtgaccagacctagctacgcatcatttttgccactgagtggacgaaatagatgtgtctgcaaaaatgaaaatctttccattttgtacagcctttacccattcttctaaaaactccaccagtcacaaatgatgtgctcagcaatcttttctttgcttcattgctttttaatcgatgattcaattatttttaccattagcagagaaaaaaggtcgcgcgaaagacaaggacactcagcttgcttctcttacatctattttaatgtaccttccaaatccaaatccttgcttgctctgaatactgaatatgcattttattattattttgaaaacaaactctatgggtgggggttcacacacattcacatgcaatcccggatttagcggcgttgatagtttcgacaattgtgaccacaaaccaggaagctaatatatgcaatgtgcattgtagccttgtattgtaggcaatccaagccagtttagcgtagcacccgaaaaaaaaaatggtttagacaagtttaacatcccctcttacaaaaggaaaactaatgttaaaaactaatgttaacgtcgtcgttggtttagacaagtttctaagtttttaaattttaaaagattaataaatggtcaccgacatcatattatctttctttttttctattataaagttagacgaattgaatctgaagagctcaccaagatcgtagtatatctcaagtttcaccaaacgattacaaaggtattcaaatatgattatctaccaataaaaccctcacatcatcttcagaatttgaacttgtgtttttgtgggatatgaattctatctttaccaattaaattaacttttgttagtcgagaccatattatttgtaagcattaaaactcattattaacctttatttttataagttttataatttatttaaaattttaaataaggctttataatctaataatgattaactaagtttcgacattatatacaattaaccactgttggtgtaaagttattttcaatcaatagtttttagtttaagttatgaacatgcagttgcattaaattaaatatttggagttaaaaatctacctaaaaggagaataaaaatgtaaaacctaatggagattaacccaaaattaaatcagtcgtgtgaaacgtgactgtaacatcccgtgagcatccagtgtattaacatttattatatcagaatgacgcattaaactttaattaaaacttgcggaagcatatacgaaaccatatttcttgattacattatgtatgaaactcataaaatttaaacatcacagcctcactagctcttgctaatccagaatcacaagaacataaccataggcagataatcataaatatctcaacatatataaataggaggagcatcattacataacataaactagttatgtacataaacatcatttgatactcacagtgtccatacaaaagaataggcatacatcgccttaatctcaaagatctttactcacacgagggtatacagagtatgtacaaaacaaaagaatacatgtgtgcacacacacacatcttccctctataaaggtacaaaacaagcatcaagccaaaacgagccactcggctctcatcctgcagcccacatccatgcaagaaatgtctctactggggcctcccgccctgagaccgttcctctctgccataagagtcacttgcccacacggggtgagatatacatctcagtaagctcaggttccttgaaggcatttcctccaccctggctcactttcatgacacgcgtcatcaaggcatcacaaacatactggcctcctggccctcataacaatacaagcaagtcatcttactctatgtacggtggatcatcatcaacactaacctcagtgtgagattgaaactcacacccgtaccatcccatctggagctaccccttacgcatggatgcacgtatatggtgcctccgagaataggcttcaaccgcgacgggaccacctatctcttgattttaagggatcatcatcacccagggatcatcatcaaccatgagcaaaccaaattaggaggtgcgctattctcctagggaggtccatatccatctaactggcagaagatctaatcacaggtattcatacacatacaagcatagatacaagcatacatatcattatgagaatgcaataaccatcaacgaatgcatcatgaatgcaactatcactccctcggagtgtggtggaacacaacaagtgggaaacatccccaagagaccaagaatttacctggcaaagtcgtgctttacaattcagtcccaacactgtgggctacgccactgacaccctcggtgtcacgccctatagaaaggcacacaagcacatatcaaacatcatcctatccgtacaaagcatatatttctagcaaaacatacggaaaaacataaactgctgcataaaattctgcagattttacacccacttaaaaaaatcacaaatccatgtgggaagctcctaaaatcacgagaatttagaggcatcaaaatttacctctcatattttaaacaaaactggtttcatccaaatccatgaaccacaacctctgcagcaaaccaaaaactagaactgtcacacactacaatagttctgacagaaacacactaactcaaacagccatctttcaacaacaacccacaccaggttactcgtccaaatgagctgatattttacaggcatgaagttcacatacccatctttttattgccactgaaagcactcgatttggatcatcctagacagatttatgatttctgcaaaatggacctctgcaacagaaaaatctgctaaaaacagagtataacagcttataataactctgcaccacaatttctaggagtctccaaaaatagcacgaaaattccagaatagacctaactcttttagctttcaaatggcactggttttagatcatttggacaccgataactcctgttatggacaaaacaccagaactgcccaaataggtgttcttggctgtcatgaacacgcatgcatgatttacgcatggaacaccatatcaacttaaaatcaacttctacccactcaaaaacatacttcaaaactgtcccaccctcctaaaactcaacattcatcaatctcactccaaaccctaaccctaacctcaagaatcaaggagaaataggaggaaatttcaaaccttagagttcaatagaccaaaatggatggtagaccagcactctatggcttccaatcgcggttcagcggcgccgaacgaaaatgggtagattcaaaacccactcttctcgtcaaatcaccaacaccaaagctcaaaagcaacaaagaacaaggaaaaatggttttctttcttgtttgctttgtgatttcggtcactaatcaagtggaaatgacaagaagagagcttgagattgaggagaaaccagaaaagaagaaaagagcaaatggcagaaaacgtgttctgcttcttttgaacatgaacccgggggtgcgtccagcaattactaactacacccgtacctccgataaagaccaaacagtctttactttcgtaaatccgtttaattacacaaataacacccaaaataccttaattaaatttagtgatattacagtgagagcatacatcgacaaagaagcacggacgggattgtgctacaccatgtccccgtaaataactttgaaaagttgagcttgtctagaatgaattttagaacatctataccaaattctatttgttctttgaaggaaggtgcataagagctttaactttagccgggaggctggtttagtgaggatattctaggcaagatcgatctactttttatttaactttgcagtacatatattttatatgagttccatttcaccaagtcaagtaaccacattggttgaaattatttctaaaagttaacaaaaaataattatttctccaaaagatgcactacatataagagtgtgttggaaaaaacgttttgctaatgttccattaaatgtaaaccagagaatcactcccactaaaatcctcttgaaacctctagagtctagaatctagatagtgtgagctgtagtccctttcccttgtgaataccccaaagttccgcctttatgacggtacttgatcccaaagatgacgtgaggcctactataaaatggcaaaggtgatctcttaggaagcaacctgcaacagccttcttagtttgcaaattcaaagccccatcacagttgagtttcacaaattcttcatgagggctgccaatttgaacatagcagagaaataactggtttcttttaatccagtttatgtataacttttcgaataggaccaatcggttaagcagcagaaggacccgaaaggctgggcagaaaccattcgttgaaatgatgattatagaaacatatcgcaagggataaaaaggtctttctaccataaaatcttattaagatccataattttaaggggttttttttcttccactgtcaacagtagagttcaatgtgtaggatcctcgaatagattttactttgggtaattaccttgaaaggatatgaatcctttactcacggccttaaccaatcaacattttcaatatttatcaatgaattttgatcaatgtgtaggatcctcgaatagattttactttgggtaattaccttgaaaggatatgaatcctttactcacggccttaaccaatcaacattttcaatatttatcaatgaattttgaaggttcattttaatatgatacagaaacatgcaggggagaaagaaaaatgtgataccgagcctttataactaccaacataagcatgtttgatggagaacagcttataaacttgaattcaaagtacatgcacaacccaacagatacgttcctgaacttttaccctataactggacagagttcaacaaatgcccccacattagtttgtcttgactctcgtgtaatctcttctcacctgtatccacaacaaatttgaggtactctggaaaaacgagtaatcattatttatgtgctgataaaattctggtaattttgattttctgtaacaatttgatgattcagtgtacacgacaaaaaaaaaaaaaaaaacaaaaaatattgctccacgatttgccactttgaaatttcaggaatttccccttactttaacccaatcttcatatttggtgcacctcctgttttacctcatcctcggctgaattagacatttctaatgtgtcatgtcgttcactggtttcgtgcttgctttcccatagcttactagccttcccaattgcaagaatcagatcaagttgttttcgctgttgttcctacatgaacgctcagacacaaccaatacaattcaaactcaactataaaaaaatgaggatactttggaaagtaaagcagtcaagaaaatttttactgagccatatacggtcaaactagatccatggtcaatatataactttttacattaccaaaaaattaaaaaagatatatctgaacacaatgaaagatttaggatattcgacgaaaggtaacagtaattctggtgtgtgaaaagaaaagggagcatagattgagatgatttaggtatgttatgagacgaccactggatgttcctgtgagagtaagagtttgttaccaagagctcgacacaaagagaggcagaggtcaaccgaaactcacctggggaaaagtagttaaacaagaccaaatagagtgaaatatagattggcagacgatgtgtctaacgacggagtggagaaaaactttaagcttggtggagggttgaactcattattatgtctatgttccagtcgtttccttttttttagttattttcctcttcatttctctcctcctttaaccattcttttattttagctcatttttcctttcttttgtcttatttcccctttttcttcctatcttcctttctctttctttgttttttttccgatctatcattgggtccatctaccaccgacccccaattaacttgagttaaaagtgttgttgatgttgatgtgttttagcatgggtggggaggaggagagggatggggattgctaaaatacacccacttgttttacactcaagaatcaatttcccacaatgcacatgttccaagagcaaaatttgtgagtaacttttggtcttaaccctctgattcatcaagagaaagggaccctgattaatctggagttcagccgggacggtaagtaaagttcgaccaagaattgtttccgtcaagaatcaaacttagatactacctaaacgattcaaccttaacttcaacacattaaccacttatgtccaatcacttgattgtgatagagtaatttgaatacatatcccaattatgttgaatatgttaacgcccataattctacccaactttaaaacaaacaagccaatagtttgcttacatacacccacatacttctaaaaaatagagaggtgaatgtaaattataggtttaaatacattttgtgtccctatagtctactcaaatttggttttggaccttttggcccctatgttttataagttcggtttttggtcccttttatgttttagttcctgcctgctatcagcgatacaccacttacccttcaagagatagcctacactatagagaccaaaaacatttttaaactaaattatattatacaattacatgcacatttgatttgtaaattgtgcctgcactgtcaggcagagtttaaataacatgggaggggaggattacctgcattgctagtaaaacctgttgaatttcaccaagttccttctccaaaatgtctgattgcactgctaatgctctagcagcctcagaattcttctgggccaaagctgcagtcttaaagaaatgaacaaataattagatatcttttccagtcagatttttcaatatattaaacttcaaccattatgttaccaagggtaggctaataaacatttagtgtacatattcttaatttttacaaacaaaaaataaacattggaaatttccttgtactagcaattgaaataacgtgaaattcagtacatgctacaccatagacatgagtttaatcaatacctgcggcacaggtatggccatatgggtatgtcatgtgtattgtatccaacatgatataaaatggcaatgcagaatttaagtgtgtgtgtgtgtgtacagaaagacacaaaaaataaatattaaaaaaaatatggatgaagttaatatagaatatttaacaatatatttcatttagaagtaccaaagacaaataattggttttaagcgtccactgattagcttctaaaaaaaatgtgatcactgactattagcagcttagggttttgtaaacaaaccaaatttgtaaacaaacaaaaagcgatcaggtgtccaaacatgatttcaatattgatgaaaatgtcaccaacgatgggtattgaaccatgtatttgatgaaaatgttgaagatggagacttctatggggatgacaatgaagaactgatacatgagtaatggcaactagcaagggcagctggtgttaaataagcaagtaaaaatacctgaaatctgagccaaatggctaacacagcttagtaaggagcaaaaggataccaaagagatggagcttgatttggatgagacataaaatgatgttcaagaaagaccaaaatctaatgaaggagatgaaagttctagtatttaaaatgattcctggtagatataaacccatttatagggcttccacctaacagcttaagcttttgggagaagttttagaatttaaagtgattctaaggtatctatatccaaatgtgtgtctggttgcacttccgcagcgcacatattgacagattttcacatccaatccataaaattaatacaaaagctagtgtaatttgcttcaacaggatgcccatcaatcttctctaatccctgatgtgcaaccaagtaattaggattgcagtccaatccttgccaacctcactctaaacaaagttaaatttcaaatttcaatgcatgataacagaagcctgtgcatagcacatactacaagctcaaagggctctaggctaagcaagtgagcaagatataaaaaccattcacgggcttctacctaacagcttaagtttttaagaaagctgatccttgactacagctatggaactgaatccagtgatggttccacgaatctatttttcttataaggactttgggcagaaaatataggttatttatgtctttttgttatgaattatataatttgaagagctgccaaatttggctaggatcataatcttcagagtttgtcagcaacttattgttaaaataacaaagctattttactatcagccttaggcttgctctcactactacttgacctgagtactagtatcatcaagcaaactcacttcatattacactaaaaccatacactcaacctaattatcagtatcatcaaacaaactcacaccatactaccccacactttcagaagcgcagttctcattactttataattttttaaccattagaagttgccaatgatgcattgcatatatggtcctcactatgctcggcgaatgaaatcccaacaaactcagtcaccaaccacattccacacacgaacacgtgcgaaagcagaatcacaaaactagtgtagcaaaatgagaggtagttacctcagctatgggatccttcaaggccttccttgtaaccctaaacctaacccccaatttctcgagctgtctcgacaaaaccctaacaaccgtcgcggaactcctcaagtcctcctccaacttctcaatcctctccagcaagttcacttccaacccgcccttcccagtctccacacacgcgcgcctccactgccgcctccgaatccatgcgccgactagaaccccgaccacaagcaacgcaccgccgaacggagcagctctggtaccgatccccgcgaggagctcgttcttggaacccgcgactacggcggcggcagcgtacgctacggcggaagagagcaagcacgagaactcgagcagcgaaaggagagagtcgaaattggaaacgccggcgacggcgacatgttcggatcggaggtgaaatgagtcggcgcggacagtgagggaattgaagcgttgagcggtgaggttaaggttttgcgttgtgaggtggagaggacgcgaggttacgatggaaagagagagagagaggttgccgtttctatttgtggtgcagagtgagtgggttgaggttgaagaaaccgaatgagggaaggggtggtggtaacaagtgagtagcattgtttgttgcaagtggcgaattgcgttagtgagtatggagtagaagaagcaacattgattggagtatgagtatggttatagaagagatatcatatcatggtaggtttctgagcagcactttggtgacgatagcttcgaggggtcgactatatgcaatgcagggctccatatcaccactggcactgagtagctgaaccaggatttcatcatgttgtccacatttttctttctttcaagagcatttgggaaatgtgatcttttatacccttttgcttcttcaagtgttttctttaattggttttcatatttaaacttttttttttaatattatatatatatatatatatatatatatatatatatatatatataagaattaggaatgaaaacatgaatatttcatacttagcaagataatactgtagaaaaaatggaatcattttaatattaaattttcatacttatcatgtatattaaatagtttcgtttaattttatctttaattgttagatttgagactttttgactttaatatagtttgaaatcaacataaattgcatacaaccccttgatgctgcaacatttcggtcttatacataagtattttataagctataacatccccttaagtatgggatattgagatagccagttataaaattgtgatgatttttaagctttactcaactcatttttagcaccacacatgtaacaaaacttacaaaatttaccgtgctttattttaatttttaaccaaaaaagtcaactcaaatctttcttttcttctcagtctcgcctgaatggaaacaaatcatttcctctgttacttttcttaaatatttggacatagacagaatgataaatcacaaaactcaattagccagcatagaattagagcttaaaaacactttaaaaatgcttcctcggtctcctctttctttattggatagaggcgtttgtatttaagaggaatgctagagtcaaactctcactcttttaaacacactccacgttactgttccctagcataggaccagtaattatggttaaattttataaaaccagttatatgaacacaccctactataaaggaaggggggcgcaagatagaaattgtcttacgacctatatgccataaatcataaacccaaaatgtccagtaaaacgccattcatatttcaatctctaatttgatcaaattttggtaccaccggacagaggaggaggcctgatgagtttaccaaagggtacatctttggttggtataaaccatagactgaaaagtcactaacataatattcaatggcaattgtaaaccatcttccaagaactacgcaagaaaaatgtaaactcgagcatcctaagacaaattcacagtaatattctcaatcagagtatataatactgaatgaagatagtgtcaatgcccaaatcaaaaaacttatgctccaggatgctccatcttcccaatatgacacattccgcatgaaacttctagtggtacggcatataacgatttggccttctaaacctaggaaccttcctgcaggatatttaatggaaaatgaacgaaaattcaaaacatcaatcaaaacaacagagggcataacatgcaaattaaatgagtcacacaacatacccgtatccataaggggagtaaaagtaaggaggagtatatggcctcctgaagccatatgccatgtaaggattaaagcgcctaggacgatattgtttcattccaggaacattggtcctcttaggcaaaacctggaaagtttccaaatgattaaatacaactaatttaaaagaatgatttcttggctgattgaaacaacaatagcaaccaaaacagtaattcaaatagcaacacaattgaatcaatgtaccttcaattgacggccatgcaattcagattcatttaacaggagagcctcttgaacagcctcagcttcaacaaattccacataagcaaaacctttaggctggccaaacttgtcagtcaggatagtgaccctgtttacagtaccacaggactgaaagtgttgctgaacttcttctggtgtgcatgcataatcaacctgtaaaacacaaatcaatttcaaggagttttgatgccaataatatcatgttaatccaaaaggggcttaaacctgattcagttatcataagaaattagattccaaaattacagattgcatataaacaataatattgttagtaaaatttataatgttaaataaatatctttacttacaaccactctgtatagaattctccattaatataatggggaattcaataaattgctcaggacaattcatatgagaaactccagagcatagttcctcttatccttcaattctatcttttagattattacttctctttttagcgaaatatttttacattattacttgtctctaagaaaggaacacaataaaagcatataaattcaggacagacctctgaaaacatcagaacataaccattctaccctaaaaatcaaactgactcagtttattttattttttaaaggatggcagaccacgcttagatctcaaacattagtgcaactcatcatcagaaatatgcattttcccaactccccaaacaacagaagaagtccaccaattcttactccataaacactttcaaactgactcattctattttttaaaaaaagtatgccaggccaccttatatctcgaacattgatgaacaattattttttctaactacaacatcaacagaaatgtgcattttcccaactcaatcatgagaagaatttcaacatttctaactccatgaaccaccaactccaaacaagatggaatcccaaacacaaaacctaaccaagcaatgcaccctcctatagatgtaattttaattgatgttcatagtcattttacaggctcttctcaaactctagataaaactcttgccttctactccttagattcatcctcctcatagcaaattgacaatcgcatcaaccttttctggtctacaagcagtggcagatgcactcacagcattatgggggcaattgcccccacaagcaattttttttacttaacatctttaataaaaaaaaatattgcccacacaagaaaaatagtgatgcccccattagacaattgtttattaaaatgaaggtagaaatttataagagataatagagaaaatacattgatatgtgtagaaggtagttgtaatgtatagaaacttagatattttagatttttttgtcatgaaattatgtactttgtaaaaacttctgtataaatccagttgggaagcttggtaactaagtgtaacttattattattattagttgtaactcaatacccattagactatttttttgtccccactaaaccctaaaccttaaacatattaagtcagaattctaaccctttctgtataaattgcactaatcaaattttgtaagaagtgatagaagaggagtaaagggaaaacagaatgcaaaataatcattcacttgcaacttaatgtttgtgtaacaacttgaaatgagaaagaaaaagcctcaaatatcaggtagtttaattcacagatgaaaaacaattacgagataaaaggccagtaggcaagcagcagctgcatacccattggcacattggccaaatgacacaacaaaggcaccacacacctcactgcagtcaacaatagggctctatgactaggattgcatgcccaacactcacagaatgttcttccaaaagaaccacaagctgtctcctccaggagtgcagttgatgcatctttaacacattctactccagccgtaccagtttgagccatccatgaaatgctactcagtttcctccacatattctttattttttctttctcttcctcttctatttctcattttttttcctcaatttgatctattttttcttctgtataatgtttttcttttcttgccttttttcttttcataaacttagtttttttctcctcaatttttttgtctgttttccttcatgtgatatcttaataaatttcataagcacaatatactttctttttttctctctaatacaaccctaagaaacaccaattagattgtcccacacacaaaatacaatgtaagcatcccagattcccagcgctaattatagaacctgagtaataagaatgaccctgcgatcatagtcagacaaaagtcaaaccttgtctctgaagtttaacagtattcattccaaaacaaaacaaaaagcagtatcaaatatatcatagtaaaataatacaatgaaaagaagcatctagaattcagttcaagatccattcaactaaagtttctattgacacaactaatagaattacagaatgcttcaaaaccaggcaaaattaacagatgattgagatattaattgaatagataacctaactttggacaagtctgttatccctggtgataaacaagggcaataaatttcagaccaattcatcctcagttaggtggtttaatagccaatttgtaagttatcggttaaaagataggaccaaactatttggcagatcagtttattagttcaaccaatcaaaccagaaggtctgcaattcacattcatgcaatatgagcaaaataagacttctaaataaatactaaatatagttcataataaccaaatcaagattcaaattgaaaaactaatgatgataaaaaaaaataaaaaaaaaaacaggataggataggattatacattgccaacaaaaacagatcgagaatctgcatcctccttgtttgcctgagaagcagctgaattagcaggatctgcaaaacagattcaatctagaagttgaaaaataataatgatgcaactctatttagatagtagtcacgtgatttggtaaaatcaagacttcacaaaagcatatctcagcaaaagacattttattttatatcatgttttgccaagattttaaccatagtcaaggaatgtaaatataaaaaaaaatatttcaaataaagtaccttggttagaaactaggaactaatcataattatcaatttcaaatagtgatatgcgggccaaacccaaaaatgctacagcagtatagcacatagcaggagaactgctattgtccacaatttcccgcagaaacaagagtttaagagatttttattcaagctctgccgtgttttaggttttatcaataatcacaaaagatgagtttaacgtggctgttattcgagacctggtgagcttaggttttatcagttgccataaaatatgattaagcttctgaatagcgattgatcgaaagagtataagataaagttgacgaattaaaatgaggataatgaaaaaccttgaacgctgccaatctccttctcgaccttggcttgcatctcgcgaagcgctgcggcttcctcttccatttccttcaatcggcgcttcatctcgtcgagctccttgacggcggcgtcatcgtcggcggcggacatgtcaatgtctccttccatctctccctcgtcagggatctctcctccgtacacctcgtgctcttcctcttccatcttccgattctacgcgatctgccctacacttcctaccaacacaattgcaatgtaaattagggttcttgttctgtatttatttggggaatcacactgtgttgttccaattcggtggagtttagactttagggttcgttgagagaaactgagagaaaaaaaataaagaataaaaaaaatacaattaaaatatttcttttttgtttggagaaagaaaataaattattttgtaaatacaaaaagtttaatttttttttcttttcattttctttcttattcaaaattttgaaattttcctagctgttttcttttcatctaaccaaacatgttagagttttacttttactacaggatcatttttagcatttgcggtcaatatttgtttttacataatttttttatcaaatttgttttatatatttattttataatgaataatatattattacattataatttaattttataataaatattcttttagtatataaattatattttaagtatataacgaaaaaattagtttgtgatataaaagttaattttaattattgaaaactaatttacagataaaactaaaagatgtatattagaaaataaatatttattgtcagttttataatttactttatttgtaaatatttattttctaaatgtaattctcaattaactgtcggatttataatttaggtccaaattcataaggtgaataaaatgaacttgagacaatataagaaacttcataataaataaaaatgttatatgtatagagaattttggatttattatttttaaattattgatttaaaaatattttcagtttaattaatttctttaaatgtttattattttaattttgttgaattgactcgtccctccttataatttatgtccaaattcaaaaaaaaaataaaaaagacaaaaatgaacttcaatactttgtaataaagtttataaataagtataaataatatagaattttttactaaaagtcttttagcggggatttggatctaatcaattctaacttttatatttgaaagataatttagttaacttgatttttacaattctttaattttgttatgttattttaatttactagtattaatcatccgtaattaaccaagtgaatctagaaagtcttataaattttttaatatatgtctttcattcatacgcattaaaaaaaaaaaaaaacatccataattgatacaaataattaataataataaagaacctggaacagattcatcttttatgtcgttttagctcaatttgggtttagctagccaaaattttatacaaataaggtttttgccatacttcaatcttatttcataaaatcaaattgaacacggcctttgaattattataacttgaaacacgtattaagtatttatctggatcgatctaaacccatttgatgaactgtataattttaattttaatttttgaacatgaactttaacccatttagtttaattcacaaaaacgtcaatatagcttgttccttattttagaaacctaaatttaatctaaactttctagtctaacttgttgtaaactatgactcacatcgaatttaggatcaacttagatttaatctcgcccaataaaatgtgggacttcggatacaattttttagcacaatttaaatgtaaattattttagtctaatttgataattggtcaatttaagtttaaaaaatcaaataatttgaaatttcattgaacttagattatatttgataaaatatttcaattagttacttttttttattaactacaaaacttgtttgactattcgataaataaacatttttaataatttattagtagtttttaatattttttgaaatatttttgaagtagcctttttaaaatactaacttataatttataacttttatatttttctttcatttttatcctaaatatatttattcaattttctaattattcttttaaataaatcatgattttatttatattttatcattttacactttttagctattttaataattaattttactaagtatttataatttaataaattagttttttgagcttccaactatctattctatgagttttgccaaacatgaaattagctgaaaactacaaaaccaataatttgttaactgaatatttagctagctttcagctttggtttgttattcaactagtttattttttatagtcatcattcttaaataaatcacaaatttattattttttttgttattttacatttttcatttacttcaacaattagttttaaaaaatatttattatttaacaagttagtttttcaatttttaattactcactctcaagtatcaactaactttttaacttttaattaacttttaaactaattttaaaaaatataacttaaatataattgataaaatgtaagacttcaactttagagtttgaggacaaattaaatgtaaaatttttgtgtatttaacctaactgtttctaattttatttctcctcaagccttattttcctctcctgaaattatatcttaataaaatattgaatttaacaatatttttattttattaactatgattttaatatgaaatatttattaataaaaaatgaatattttctttaaatatgaattatttcatatttatatttaattttaagattcgaatcctacatcatttggttaagaggtagatatcaatatcacttgtgtcaactaatattaataataatatttatttaaaaataaaattagttgatctaaaaaaaataatgttgtgaatattttaaatagttatttgcaacattaatgtctggccatgacccgaaatatctgtatttgtgtcaacagtactaatcagacaactcacccgagaaatccgcaaccgtagacgctgcgatcgctcgaaagtaaaaaccaaagagctgtcctcaaccgttcttcctctcatatttcattaatcatcaatgatcaaacaccgcaatcagtttctctgtgtacaagcacccaacaactctttatgcaaacctgccacttctcattcattggtggggagacgcgcttcttcattcccacctcattcgtgcatgtgtcacgtgacacgtgtcccacccctagtaatcacacacgtagtgtaccataagagttttttttttcaatcttaatattcatacttaatattcacagttaaaaacagaaattaatttttgttgaaaattaggaagagacaccaaattcccaaacataattttcataaaaattcaaatttttaagaaatcagtaatcaatctctttcactctatcacttaagtgttaagagagagatatacaataaataataaataaacaactaagtgttcctttaataaaaaaggcaataacaaaaaaaataaaaagagtgtggcatttaattggttttaagttttaaccttaaagcgaaagaaacaccaaaagcgagacactatatatatgtgtatgtgcaagtaagtgagttgaagatatattattgtgactgaacagaaaaagtgtagtgggaaatggcaggtgcgggtacaggaggagggtatggggacgcgaaccagaggatagactacgtgttcaaggtggtgctgataggggactcggcggtggggaagtcgcagatactagctcggtttgcgaggaacgagttcagcttggactcgaagtccaccatcggtgttgaatttcagacgaggactttggttatcgatcacaagaccgttaaggctcagatctgggacactgccggccaagaacggtactctataacttcttttccaactaacttttatcgttttccatagtttcttaatattgttagtttcggtttgaatctgttaatttgcgtcaccgacgtcgtttcgcgcgtgatctgatcgtcgcggcggaggatcgcgtggatttgtgttttaactaaggttactgagctgatctattgtgatcatcgcgttgtgtattggtaattgatatgtgactgaagcacgtaaaggaaaaagagacggtatagattatagaacatggacaaggatgagtcccgggactttaccacgaaacaaggaaaattcgatccaataatattcattaagtggaaaggaagtttcttattgctaccaattcgtgttccacgaacactatatgttgcttatcaccgtgattttcgttaattttgaaaaaaaaaattatttattttacaattgagccaattatattaaaacatctgtttcgtaaaattttctttttctttctacaaattttcgtaccatttagtattgctagagtggaaaacatacggcaagccgttttgtagtttacatgcagtttcatggtaatattttatattgcgaaatattgttaagaaatctggcttatatggccacaattgtagtagtaaagaccaaaaaccttgattttggactgtagttgtgtttgcaaataactttgtaaaaccttgaataaggttttaaattgtggtgcctccagttttgtcacaatcctggatattgtgaaaaattgttgacaaatattgttaatatggctgcaattgcagctgctaattaagaccggcaaaaccttgaccttgtggctacagtaatgattgtagaccattttctggttttgaattagaagtagttatttgtacagatgactttgagttgtgactgtggtctcagattctcagttaccgaaattgccgggatgctgttaattccccctctcagttttttgaagttcgcaacggtatggaacgaatttctggccacaatgccactgttttcctgccttttttggtgtgaatgatgcagttattattaaaactccaagctcccgttagatttaagcttgcatttgcattgctggttgctgttattgtcttttcttatttggtcgatcgttactgctattgtctaatcttttatgataaatctatgtcaaggaattgatgctgatgccttctgataaatcgttatacaaagttgttgactttcaagctgatgcatctctgcatttggtttttcttgctcgacacataatactctacattctcaagctatatgacaaataataaatttttaaacaaaaggaaaatgaaaactgaatttggaacatcgcatgcatgtgtaaattttggtattattttgggatgggattccgacagatggtaatgcatgaattattgcataagttgtttaatgtgatatgatgtgacgttttacatagtatagagaaattagttgcgcaaatttgtgaggaagactcagaatctcattaagtttcccattttcaactagcagtcaccattctccatttagtgagattttaaaataactgattttccaatatgaagtacaacaagcctcagtttaaaaccgttgtctatcttgagatttagagcatgcagacagaagtcagaacacgctgcgacggactatccatgaaattggctgcatgggcaatctatgcaaatggttcagacttgaagagtgctttgggtatctcaaaatattattttcaccatctatcttttattttttttatcggccttattttcacaatttatcatctcaatcttccagagactttattattattattattattattattattattattattattattattatgattattattattattttgaacagcttttattattattgttgctgttgatccttcaaaaactttaataataagtgttttacaacttgtcaattttgatcaagtagctttagcacggggcatcatttagttaaattgtacttgctaacataattagtttggacatgctttgctttttctcacttgttagtaattatcaacagtgtagaatagaactattttttcttgcatgcaatttatatctagttagtgcttcttcacatgattaattacgattatttcttatcatgtcttggtggttcgaatggttgacttacaagtacattaaatgccaaatttcagtttaacctaatatttcattttcaatggtttatgatacagatacagagcagttacgagtgcatactacaggggggctgtgggggcaatgttggtttatgacatcactaaacgccaaacctttgatcacataccacgttggttagaagaactgcgcaaccatgctgacaagaacatagtcatcattcttacaggaaacaaatgtgatcttgagaaccagcgtgacgtacccactgaggatgcaaaagaatttgctgagaaagaagggttgtttttcttagagacctcagcactagaagcaactaatgttgaaacagccttcataactgtcttgacagaaatatacaacattgtcaataagaagaacctaactgctgaggaaaatcagggaaatgggaactcagcatctttgtctggccagaagattatcgttccaggccctgcacaggaaatccctgctaagaggaatatgtgttgtcaatcatcttgactttatttacaatttgtttcaatttagtgtatttcatggttgtgttcttattaccaaattttaaaggtttggcgcattgctttttgtacatttaaatttaatttgatttggttgccgagttaaaaactaaaaatgaaggtagatacaaattgcttttttttttctttttttgaacaattgcttggttcaatatacattttgtaggtgaattgggtggacttggaacttatcgaacgtgaaaatatcatcattcgtgcttatagtttgaacattgctatatttttccaatggggtcatctggtaagcccctgcaatcttacgtacaaggtttcttcataaatccagaaccaacgtcatcaacagtggaacttgttagaggattaagacaaaggcaatggcttaataaggtgctaattgttaaattaacaatcttaagatatggatattacgcataaacactttaaatcgttatttaatcacaatttattatatattataaatttattaattttgatattaactattttaaaaattatattaatagtaacttatgataataaaagtgtaaaattatttgacaatgtcaatatataatcattaaactttaatttaaattagatttgttaatttaggtaaatatgataaattttaattttattctttaagtccttgtaaattttggaagttttttaaatatttttgtaactatttattgataataacatacaactaaatatgtcatatcagatgccatcttaaagattttgttaatatgatatgtttggaaagttaatactttatcattaaataataagagattattttgaaaattttcatacatcatcaatgtacaaatttatagtcaataaattaaaaatgttttaaatgatttttaaaataattattataaaagttaacatttttgttatatatcacaatttatatttaaatgataatatagttctattaaatcatttgaaaaattaaatttatgaagatggaaaacaacattttttaaagagattaaaataaaaaaatccatccattttacatcaaagacaaatctaaaagtgaattctacttttatggcttgtttagtagtgttgaagagaaggagaaaggaaaggaaaagtgaagaaatgaaggaatgttgagaagcatgactcatttggcttcgtgaaaatgaaggagcaaagaaataaaaaggtgtaggtcttcacaaaaaaaatgcataaatagacaaaaaaacgttgatggcaagaaatagtcaattatattaaaaaaaaaaaaaaaagattatgttgcttattgaaagagagttttgactatagccatcaacaacataattgattatgtgttggaacataattgaatattgactttacgcttcctcttaacacataatcaaattaattacactcacactcacttagtgtgtgtttggttggagttgaaaaatagattgagtttaaaattgattttggatactttttcatatgtttgtttcatgttgaagaaaaattcaaaattgattttgttccataattaattttgggttgaagcaactttgagtagtttttgcgttagattcaaaaatttgtactgaattttattcctaacttgattttataataaaacatccaaacataaatcacatcattccattcaaaatcaattttgataatgtccatctaaatagacacttaatcaatcaccctctcctgaacacctaatcaattatctctttcccgccaaccaaacaacctcttttatttctcttttcttatcttctttcctactccattttcactatatatatatatatatatatatatatatatatatatatcttttcttttcttattttcgacccacttctgcttgcattttcttgtctctttgctaaaaatacttaagatttatggttaaatgtgtgagaagaccatgaaaatgatgagaagtgggaagaaatacaaggatggtggtggtttagttgcaatgagatcaaatttgagatgaaatcgtacatcatcaacttgttataatgcattcaatgtgttaaataaacaaatattttcctaccacataatataatatattttatttaatatgaattttttatctaccaaatcactttaattcaaatatttttcttttatttagttctttttctcttcaatcaaatcacttctatttctactctattttagcccatttcttatctatttctctcattttctcttacatattctctttcattttcttcttttctttctttacaatcaaatacatccttaatttctcaatttgaatagcatgtttgttttcccatcacgtccacttcaatccacatctatatagcttctaagtttattttgatatttgacgtgatttgagccactgacccacgtattagatgcagtaacaaacatgcattgaatttgaatgtatccaatacgaattgatttcaactaccagcaacctagaatgtctagacctatcagagccaatactgtatgtccaacggaaaagtacgtcaaacattgaactagagttgttaactaccgtaatgaacaatctaagcatctcaaactaaaaacaaaaacgcattgtagctaggaagctacctagatataatgcatgtttgtttcttcggttaaattgcgacagcatgaagcctgagaccatttcaccacaaaagtaagaatatcattgtttcctaaaaaaggaggttggtcccaacatactttcggaccgataatccaaacacgcttataattgtagagttaattcccgtagtaaaataaacggcatctaagttcgactgaaatctaccagttacatgtcaataataacctggatgcgcgaggaacgactttataaaattttctcatgttgaacctctaaagtctaaaccatacagcaacagagtttctcagaagcaatttaagaaaccaaaactataaatatggaccagcgtctgtctataaaaataatgacggggttaacaaaaacaagcaattttttcactatcgttgcataggtgaaggacaaaatcaccatttctataaatgacaaatagaacaaatatctgttacaacgtacaacagagtaaagaatatctgttaagcagtcaattttaactcagtagctttcacatcatcatcatcatttttcctgttcaactcttgcacaggctgtacttcttccacatcattacaggaattgtccaaatgcccagaggagcccttttcagtgtcaaaacgtattaaaagcctttcaagtagttcttggcagtccattgcagtaaccatcactgacaatctcgccctacccttccagcatccaatggctatagttgactcatccacttggagagactctgcagcaactgtttttcctgcagaaaaagaaggtcctataaacaaatatgttgatgccaatgggtattaaatttctcaatggcgtggtgacagtgatacatacctatacacagaattaccacacaacagcctggcaataggtttgctgccttttgaccaaactcggcatcagtaaaatcttcaaattttacttctttgttctgcagaagatgcttgaattctgcgggagatgcatgcaaaatctgtttggttatgtatgggagaataaggggcaatccttcagatgatatccggaaagcacatggtgcagagctaccttctcgcgctgtttgtctttcctgtaagatgaaagtatatttcactcagtcataagaattaatcaaagctcatttatcacaggcagtcaaggactgaccaataaatattactaaacggagtagatggtgccaataactagcagaatgcatgtcacttgtaatatcctagaatattccaaaaagaaatttggtatgtaaaacagtcttacacgaattatttatttattatattacataattaatcctgaccatcatatgtcgtagttaaatgagcaaatgactgtaatccatatcctattaaaatcaacatgaatttaaaaactgtcaacaaaacaaaaatagaaataaatgcctaggtactgaaacaatttatgaaacgactcagaattactattctctaactccaatagtagccataaacaatagtatagtctactgacttctttacaatcaaaatgtcaaacaaattatacacttcacttttactaatcaaattctaactaaatttgtttcccttgcctagatcaatctcctacgactgtaggattatctaactacctatgttttttggagtgcttctaatgaggaaattattaacataaacataaattatttttacaattagtatcatggagaataaataaatcaatcacataaaatataatactaacaaaaacaatatctcttaagttgaggataaattatacttacaaacatcttcatgccaattgatgttattttaagttgctgcccaactttgaagttcaactcaagaacatccttgactgacttggagatataataaattcttttcacatgatttgtatcactgtttcttgtaacaaggtgaccattgaatggaaaacgctcatcaattccatagaaatcctttatactattaataattgtttcatctttgaaaaaaacaacagggtcaacacccctccatttgccttgaatttgtagctttcttttgcctggaaccctctttgctgtgttttgtacattatcaggctctcgagtttccttggaattgttctcttcacatgtaacagggccaacttccaaatcttcggtattgggttcattgtcatctacattttcctcagacactgcattcaagacttcttcatgtgcactttccggtgaagtaatctgtggtactagtgcatcattaagactctggtttgctggttctacatattgctcgttaatcttttttttggtttgttctggaattgctgcaataaagaaaaataactagaaaacctattatggcaacaaagaaaggtctgtgactaaatgaacataaaaaaggcagaaatggaaacttggaatttttttcccaagttctccaaaatttcccaattatctgttaacagaatcagagagagagagaaacaaatgtagtcataagaaaaactacctggcagaggagaaactttttgcagtacagcaatgaagaaggctccagtgttctgatcatgaggcagtatcctcatgcaatgctctagagggacatcacaaacttccgcagcagactctgacatcacaggattctctactgcttgaacaccatctccagcatttccgttaataccattagtaacaccctctgggtcaacactacaactactatcaacaagatcatgatggcttctgccagaaggaaacatactggaaagaattacacttctacgatacttaggaacatctttaaaagagaccaaccaagtgcccttgtcatatacctgcatctccaaaatcaaacacttataaaaaaaaattaaatgcatgcagctacaaaacagagttaaccccttccacatttgaagccacaaacaaaatccaaagcagaaccaacagcttctataagaatgcatggtcaagatggataatcttaagaattttctttttagaaagtttaaaacttgattctataccatggacatgaatgttggtataacttgacggacatccaacatatcaaatagcaaaaattttattagaaagaattcactaccagtcacattcacttataaaaaaaaattaaatgcatgcagctacaaaacagagttaaccccttccacatttgaagccacaaacaaaatccaaagcagaaccaacagcttctataagaatgcatggtcaagatggataatcttaagaattttctttttagaaagtttaaaacttgattctataccatggacatgaatgttggtataacttgacggacatccaacatatcaaatagcaaaaattttattagaaagaattcactaccagtcacattcccccccccccccccccccccccccaaaaaaaaaaaaaaatcagcaaaacagcatttcaagtccatcaaaattcaaatagcaaggaataacacaactgatgaaacaaacattttcacaagaaagccagccacccttaacattgtcaaatcacataatgtaagagggaattgtctccaagataatcctcaaacatgagatacacattaaaaatttgggatgtaaaggtagggaacatatttggtcattaattacatatattttcttcaaaattctgacttcttaacaaataaatggtaagttgatcacagcaaacacaaaccttccatctcttgagacctggctgacgaataagttgtggaagctcactagagacatcaacaagtttgacagaccctccacaccttcgcaaaacctgcagcatgacataaaagagggcataaaaaaaagaattgagcagagcttctctttacattctcatttgtctttttttaaaagaaaagtgctttttagttaaaaaattgactaaaaaagttactgtttccataagctaaaatctacaaataatcacttttgaaaaaagcgccaaatcctgcacgcaaaaacatcagtggtaaataaatactcataaacttcattcacagattattagtcataaattaccaccaaaaatatttttttaaaaatgtcgggagtgagattgagagaaataattcaagtaacatgggagaaaaagcattcatttatttttatcaggaagtgaaagacagagaaatagaattgctacgctgcaaacagccaaaccagtgaatgaggaatgggatgcctttggagtagagaggaaaagaaacaaaaagaaaaggtggaacaaaactgcctaagtcatatcctgctgttgtggaagcaaatagaatttgcaagcctttacccatttttcattctcaatattaatatatcaaagcacttttaaggggaaatctcaaaaaaggtacgtctgcaacaaagtatagagctttcaagttaagattacctcagcaaccacagcttcattctcaataggattcattgagcatgttgaatacaccattcttccaccaattttaagtagagataaacctgagaatagaaatattcagtaaatattgacaaaataatcttagaaaaatatcataagccctagttcatttctacttattaattagctaaagacaaaaaacagcagtagttttttaaccgcagtatatctgtttattaaagttttagaatgagcaaaagagaaaatcaatttaaagtacataatatgaaactattccttggtgtaagaatgtctgtcatcttcagaacacacaaaataagcacgataatgatacattgagaaatgaggagtggtagtaacactttcattcttacacattattattggtttaaattaattggaaattacaaaatcatgtgggaggctaattaaataaggagtaagacacaattttgtggtttccaataaatttcagtcaataatagtgcattaaagaaattgatggaaggtcataagcctttgtaagtatatgtcaggagaaataagaaataggttttagcagtaattctcactatttctgtgctgaactgttatgtgtaggttacgtggaagttatttgtgtggtttatttggcagttatttgttaattgtgggttggacagttattattctttgttttatatgtgttctagaagtggggtggattattcagagtgtagttttgttgcttgctgtgtatcaaaggagaatacttcttgaagggaaaacccttgtgtgctgagtgcctgacagcaaatctggtcattaaaagtttaaaaccagattttttctgaaatacaatcactgttttgtgtttataaattcttgaaaaattactggtctggtccttcaggctcaacataatgcaagtgtgttatctttcaaagaatcggagagaagcacagaacaataaattacataacaaacttaatctggaagaacaaatagtttcacttaatgatccttgtcaatttaaaaaaaacacacacacacacaatcaaagacggatccaagagggggcaagcagctcgacaccccccctgatatactcctggatctgtccgtgcacacagtatagagcagccaagtcaccatgaacatcttgtaactaaacctaattgtccatgttagacaagtctagttgagttcaatttataatcatctgctagttaacaaaacactaacaagcatatcatagacttaaagccatcttacaatcaatcttctttttcaatggctacaaagaaatttaggttgagaggaggttatccttgatccaaggcaaggacagaccaccgacttcagcaaggatgatttctagtgattagtgaaatgatatattgtctaaagcaaatgtcttgaacaaaaggtcaatgtgagacaacccctgttggctattactaattttctagctgaaaaaaaaaaagactgtgatgatggcaccatacaaggaaacagaacacaagactaatgttggcaggacctaaattacaaacagaaagcaataaaaaagcacctcgtatagcaattaaaacttgtaggctgtgaaggccatgtcccatccctgtgttcctgcaaaaaggtaaaataggtattaaaataatttggagattgaaaagaaaagaaaaatagaagtggagctagataaaggaataaaaactaccatttcctccagagatcaggtgccttacgaagggtaccatctccactgcatgggacatcacacagaacacgatcaaataacagttggctaatattgtgatctaactccatcctttcataattcctgtttaaacggcatcctgggaagtgctgagcttcgtgatttgtaacaattaggttggctgtgcacattctttttgtttggtggatgagaagattacatctttggacatcaagatcatttgctataacctaattataaaaaagacattgataaaaactgttgcatacgtagctggcccaatcattacaggttgaaattagataactctttagtcaagaaaatcaaaatgctgctaactaacaacacggaataaagggcaaagaaacagatcaacattttcgtaattaaaacggcacaaaccattccatcaggtagtgatcctgctttagatgattggtgcataatctcaagcaattggaacgtttttgaacctggtgcagcacacactgaaaaaaggaaagaaaaataaaatagtcagaattgctgaagtttgaattccaaattaagcaatataaaataagggctggtaaaacaataaaaagtactttatacactagaagttgcttactatcaagcacaaaatgatctgaatgcacatccaagaagaggggaggaacctatgtttcaaacaaccattagagtgacattagttgaattcttgaaaggagaacaattagtaacctacaggtactaaagcattcaatattttcaaaattctaaaataaaagaaaatcactttgtatgatcatgaagattgaaagagtatatgaagtgacccaccatactgacagcttcctgtcttgtaatatttccaatctcattttctagctttaagaattcatggaaccttcaatgcaagatttaacataatcagaggcaccaattggcataacatttcaattcattatttggaagtagcatgttcatgtatttcaattcattatttgggagtagcatattcatgaattctattgacctctcaagcgtttggttcttcctgagctgcatcctagaaaaatttgaatgccaagcgaagttcccagggtaccacagcaacggccgaatagcctccgtctcacctccttcaacaacctgcaaacaacagttcagttcacaaccaaaaataaacactatcataaaaaatacaaaaaaagaaaaaagaaacagtagcaggtaacatacctcgtcgcgaagagaatgcacgaagtcattctccaattgagaacgaaggtcgtcggagaactggctactgcaatcgcgaaacaaaacgacatgcgaatgagagaagagaagaatagaatagttatagaatagaatagagaggttgggattgttagtttgacctagagttgattctgaaggttgcgggcaatggagttctgagaagtgcaacgaattggtcccagtattgcgggtccactattccctgctctttgtagtagaaatcaaaatcggcgttctcagtggcgaagggagtccacgcgggattgttttcagttgaagaaggatcgggatccgatttggaacgcttccacacgttctctctgctctggcggaagtgttttctctgagtgcgggatctgcctcctctcccgccaccacccattgttgtcgtcgcggattgcttctgattctgctttgccgggcagttacgccgttaggcttttggtagggttttggcaaatcgtgtggtttagtaattgattgggcttttcagcctcaacacctgacccaaatatccctggacctgcccatccaaacttcttttttatttccttaaagttcgttccaatatagagtatttgcgaaataatatgatttttttttactcgtagttcccatgggttttaatatattgtagttagcctaatatacaattgagtattttttttaaaagaaaaaataaaattgatttaattatatttcccctcgttttcagtcgatttccacttttaatccctaaaaaaattgactgatcttaattcttagtaaatttttcatccagatttttttttttgaaaagagactgaaaatattaatattgcaaaaattcttaacatgaaaagctctgagtttttttttaacaaaattggaaaaagtagtaaacaatccaatcaaacccaattaaatttaagctcaataatacatatgctttatcacatcgaactaaatagctcatattttattcgaactcaaatttagaatccaagccctaatatttaaattgttattatcataacaattaccaatatatgaacttatagataactacccattaatgtttaaattgttatcattgaattaagtaccaacataatgtgatgactgacaaataatttagcttattaaatacatggtcaggtgttcgattcctaatacttgcatataaaagaaatgtgttgggagttaaaataataatagttgcagcaacaataataagaataataatggttataatagtgataataatgatcatgagataagagtaatatcaatggttgcgacaataaagaagagggggaggagtgataacagtgacaaatagtaaaataatgacagtgaatgacaataaaatatataatacattagcacgatacagataacacgtaatacaatagacaaatcatatataagtgtgcaccaaataatagtaataaagtataattattatatgttattgtatcatattctagtcatccaagtcttttttaaaggttaagtttaaatttgaacattcatatatcctcggtttaaaaaaagaatcaacaaaaggttagtattttaatttttaaggagcatgacagcataatgcatcagcatcgctgatattacattagttgtctagtgctcttagacgatgccgatacaatgacaatgatagatcacttattattcaaatgtgaatttgtcatctaacgtttataataattacatgaaaacgatacatcgcaaattattttatttatataatagagagagaagggaaggatcgtgcaacagaaataaacccaaactactatattattaattattacatatgcatacagtctagcttgattttttggctaagcattaaaccaaccaagaaaccagtaaggcagtaacattcccttattcccacataggcagataacaagacaagctaacttctaatcaaaggcaaatcaaaaaccatggtagagaggttttgtttgattcttccctatctatctatctatctatctcgttaagcaacatcttatcttaaactgcttttaagggagaaatagtgtgcaaagtgcaagattgcaagcatcatcaatacccattcacagtgcacagacaaaatcaccgcttgtctcaatgtcatcaatgtcagcatccgcatcaatatcatcaaggtccatgctgcccccaacaaattgctcaccaacttttggaccctcaccaggtttcctagcctcttgaattatggacagtatttcttcaatgctttgagtctcagatgagtcgtcattcacatcatcattttgcaacaccccttcaccctcttccataaattctagtggcaaattctttaggaaccaagggtgcattttaatctccggtatggtaattctctgcttcaaataatgtaacacaaagttaacatcatataataaataaaaaaatgttattatgttctgcaacaaacataaataatttgtaccttttccgggttggccacaaatattcgagacaaaaggtacctacactctttactgatacgtacatagtctggaatagaatagtggacactaagaattcgctgccaaaattatccaaaaataaactaattaataattaattagtcatattactcttggaaaactaaaagggaactcgtattattattggtccaactaacctgaagtgtttttctgaagtttcttgggtcttctgggtcttcaaaaggatatgctccaaccaacatcacatatagggtcaccccacaagaccaaacatccgcgacctaatcattctcaaggataagaacttatcagtggccaaacattagctccaaatgagtgaagccacggctacatgattggaaagggaaaatttagatataaagttaccttgccatcatattctcttcttgacaaaacctctggtgcaatataggcaggggttcctacagtagattttggctgggagtgcaaaacagatgactgaagaaagataggaacaccgttgagtaattaagaaacattatgttaaatgaaattaagaagtagcaataagtacttgcctttgagtaaccgaagtcacagattttaagtcgtggtgctgagcttccatctagaagtgtgttctccagcttaagatctctatggcaaatttcctgcagcaaaattacaccttcaattcagctatttaaagtagtaggacttaatttaaatcattcattgaaaaataaaccatttggattcagattggacaagaatatggtaccattgaatggcaatagctgactccagaaatcagttgctgaaagaaatatctcgcctatgcatggaaaaggagaaattagtgtgaaattttctgttacaagtatctagaatgtgaaatatagaaatactatatataaaataaaactaaaaaaaaaaaaaaaaagagagtctagatacgatgtccaaattattagaaagcagccaacaggccatcaacttgccattcgaaatttcacacactaatatgtttcatgcataatgtacagttgatgcaatcttaattttactgttttggaatctaaaaagttaagtaatacaatggccatcttgaacaaaagcactatcataaagccactgaagcttttcgttatcaattattagaaatgatttatatctaatctaatctacctcgtcctcactgaatctcccagcactgcatattctttcaaacagttctcccccggcagcatattccatgactattgcaagatgagttggagtgagtaacacctgcgatgaattatatgtcacaaatcggcataaaagtcaagatgctgttagctaacatgctataaatcccacctggactagtcatatagttacaataatatatataaatgagggacgataaaacatgaagagagctttgaacgaagaagaaacattacatctcctattacaagagtaatgtatatcttcttctttcaaagcacctatcttttgttgcctgtatgcactgttttggtcatattactagttgacatgggagctcgataaaatataagagaaagaatttaagaaatcaaattgaaaagatttcttgttcagttctttacaagattctggaaattccttttaaggaaaaccaaaaaaatgaccctgaatattgagatccttcagggaactgtatattgtagagaataaaactgaattatgaggaagatagaaagaaaccatgctttcataacccgtctcgaatatttattccattccgggacaaaattgaatttaggacagagtttaggtgtatatgtccctggatgcatatatattttcacaaagttggtaagaagtagctaaaggaagggaatgattttcttcagagaaggtaaacaattacactttgagactatactcatcgaaaccaaaaatgtctccaattccttacctctttaaatctaatgatattgggatgcttcaaggacctatgatttataatctctctttgcacgtgttcatcaatctgcaaaacccaaaagaaccccattaacaaaggacaatccaaagtacatatgtacaagattgagatatgacaacacaaaagatacatggagtttgaaaatggaaccttgaagcctcgctcaatgaacttgatagcatacaattcaccactccatttttccttgaccagctttgccacaccaaagttccctgacccaatatctttaattatctcataccgttccatggttaagcttgcaagcttgaattgaactctatgtaataactatcagcaacagggtgttgtattaattgaggtgtgtgatctagacaatctttctatcttgcttttcttattggactttaactacttgtttgcgtgtagcatcgcatcttttttatggcctccaaattccaatgcgcaaaagtttgcaaatagaagatgattaggttctgggtttggatgcccttattgcaaattacaattggactgtcactatgccttcagacacaggactttgtatgtcagaaatatatacaagtatttagtttaggtaggtataatttatgagagatgacatatcctttttcactattttttcttgataatcgtcttaatatcttatagaaaattaaccaacatatttaatattttgaaaacataaaaatcttcgaaatttactttgtttaatggttagagaatattgtaaaagaataaaaactattagtatttactatattattattactattattattattattattattattattattattacatcttttaagtatttgaattattaattgatatgtataaataccatatttgtattataagtgaaaattttacgcatattatggcctgcaattttgtttatatcagataacaaccctcacataaagcatctcactaatccgagcatgaagggtaagactcttttaccaagtttttaatataattactttttaaaaatggattaaaaaatactagttacatttataataaatattgtatttgatttttaatgttatttatatttattttatttttaatcaatattaatattattttatttatttatttgataagattagttttataaaattattattctatgatatatgatagtatttattagcttttctaaagtgcgtaaaataacatattttaagatggggaaagtaaacaaaataaaatatcagaagataaaaaaaaaaaagtgacacatggcgtgaattcattggctgaaagtagtagcagacaaacaaagattttgatccgacgatgcagtcgattgtttccaggaccaaacgtcgggtaaggacagcgacgcgtactcgcccttccacgaacatgaagagaacacaggtcaactggtgttgaccatttttcgcgtcagaagcgcgagtataggagtttgctactctcggcgagtgggtgtgggtgcgcactacagagaagtaatatgcgaatgaatgagggtacttgttacgacttacgaggtggaggagcagagacaggtcagatcacagccatgcatagacaaatttggagaagaccttatctgacacctcattacaaatttaattaaaatgcctcgtgtattacttttatttggtaagaaaacagcaagcatttattttattttatagctaaatttagcaaataaaaaaagtatattcaaaagaacgtaggacagagttttgttaacaattttttttccctttgttagaaagagtaaaaaaataaagtacttgataattttatatttgtaatttaaaaatcacttttaagttgtatgcatagatcaataaaatccccttaactgttctttaatcttaagatttgaaataagaaatgaaatgattttaaaattaacttatctaaacatagaattcgaaacataagagatttgaatcactattttattcaaataaaatgctttaaaaatgaaagggttttcattgtaatagttaaactttcatgtattttaaattgcttaaaaatgaaatttcctttatccaaaactacctcgtttttaaaatttaaacacgattttatttttattatttataattaatatttcattaaccaagtaaaaatttgaaatgctttaatttatagttttatattttatttatatttaaaaataatcatatgatagatgtcccaaaaaatatattcacgtgatgcacgatatatttaaaacaagacattaatgtcttaatggagggcgtatttattgtatattcgatgaatctggaatttattgtatctggtctaggcttcatttttgttgagacagatgtttccaactttggagtctatcacattcacatcctgcagaatccatgccttgcccagttttaatgatttgtctaattaattaccttacctttggaggatatagtttcaaacatcctctctcagtgcctgattgtataaaagggattatctttgaagttagaagttagaagttagcagttagcagttagaactgatttctttttcttttcttgaaatgaatagctttcacaatgggtttttgtcttaaaaatcgtataggctccttttctataaataaatgaacacagcttaatcaaacaaatgcttacatgaaaatccaagctcacatctgagtatgtagattggtgtggggtttttctcaatttaactaataatttttagtttaaattattagtttgtgattatattaaatatttgaaaaaaaattatcatttataatgttattgactgaaataaaattgtttacaaaatatatgtgttattaaaaaataaaaacaaaatacaaatcctagctaaattaacttgtttcgtgagtcacaacattatgttcacttttttttttttagtgaacattatggatgattttgtttaaacataaaaaatcaatttaacataaatgttatttaaagaaacgtataagatttacttttttttaaaataaactatttattttaaataaaaactatttaaattaacaaatcagaaaaaataaaattacttattttattaagaaaattattgttttaaaaaataagtttaaacaatgtcacctatctccatttaaagatatgcactattcaaaagtttacaaagtaaattttgtttacatatatgattttaaaaaaattgtaatgtatttattttatattgaaatatttaaaatattaccgtgtaattagtttttttattccttctaatagtaatattaaaagatgatgataaaaattaaaatgatatttttaattttatagataacatatgaaataaagaaataaaaactattttctaaaacgagtgataatttaaattggagtaagtaatttttctcgaataatttgatgctttacaaattaaaacgaatgctcttttgattattcaggaacaaagcacagtattttgagatcttaaaatgtttttatttttctattaaatgattactctttattttatttttataaaataaaatagaatatttcaactttgtacctattggcatggaggcctttcttctaatacctctcattactaagaaatgtaactttatcatattatttaacaatattggtatacttttattttgtatgtttttcttcatattcatgttataacttttatctaaatttcaaaacattaatatttgtgaggaaattattgatatttatttattgttttttaattagttgttgaacaattgttgtgaatattattgacaaataaatgattgataattggagttatcatgttggtttgatagtaaaaggagaaaaaagaaagacaaaagttgtagatttgataaaaaaaatattgatagtttgtcaatttaatgataaaaaacaataataatagatagatctttggatttttcacatgatcatatgtacttatagtgttttttttttttcaagttaaattaaaaaaatccaatgattaatatatgtatatacggctcaattctaaattttatcatccaactttcatgatttcacaagttttactacctaaattttcttcttgcgaaatttactatctaactattgaatttgtgcacattttacaattgttgacatgtttaaaaaaatttcaaagaaaatacaaaatgatgttgttttattaccaatgtaatggtataatagatacatagataaatgttaattactcttttgaacacattcatattatatattgagataattttcattttttagatatcacacaaaataatcaaattttaatggtacaatagtatttttacaaatttattattttatttttactttatttttacttaacctaaacaattaaacatgtcactttatttttactatattagtatatttctctttcctctagttgtctctcttttatttccatttattatatttatcttcttataaccaaatagagtcttgattattgaaatcaaccattatcaatatctcatttagagcatttttagtgatagattctaaattgggatcttagatcactttttaaaatactcatagtaacacgtaggattgaaaatctctcaaaattccttccattttgttttttaatgatagatctcattttaagatcttagggagaaagaaagatggattttttttgaacaatgtacttatcttaaaaacaacaataataacaattatcgcaatacatatgaaaaacaaaatatgagatgaaataaattatcaagttgaataaagtatgaaagtatcccgtgaacataaaagagaacaaaactaagaagaagaaaaaactaccaaacaaaaagcaaattttgataacggctgaaaaattagagaccgataatgtgttcaaattatagaaatagagaaagaaaaaggattataatattaaataacatatttatatttttaaagtgaagagctgccacatcaattatgagccaaagttcatacttagacaacctcttccacccatctccggaccactctatgcccttttcctctctctttattggagtatcactggacaaacaggggataatgttcatacatatgtatcgctggacaaacaggttgtattataaaagtttccccccaaaaaatgtacgaacggaaagttttaatattaattcttattatgtaaaataaaactactgctttaattggcgaataattcttaaaaatcacatataatactagacttaaattttgtgcaacataaactacgtgtttcattatttatatatatttgagttcatcaaacaatgtgtttatgaatccataaaatattaaatgcatggtctttttaaaatttatattaaataactccaaactcttttataaataaaagtattttctgaacaactttgaattatttataaattgagagaaataagaaaaaaaagataaataattgttttgattgataatatagtataatacaaaaaaaaggacaaaaaagttattaattgaatgtttgaaattttttattgtccaaatataatttagtatgtgtactaaattggaagttgtaagttataacatgaaattttgattgaatgtttatttgtgtggattgaataaatcttggatgaagagttggaatgaaaatataaaatttgttggatggtgaagatgatgtcatcctttatttctttaaaggtatgaatgatgcagtttcgacttctaatcctggtgaattttaatgagtttcttatttgggacttagattacctttttctcacaaaaaattcgttggatgattaaaaaaaaaaacatcttcaattaataaaaactaacgaagtatcggattaaaaaaatgaaggaagagttggtggagtgtagcaaaagcaatatttttgggaagcgggtggtgggtgtggtgggaccagcactgtccttgttagagggaaggtggtggggccctcttttttctttgtttggggactgatggaagaaagccaagaaaaagtggtgcgtccaaaagcaagcatcaacggttgtgatgagcatatgagaagaaggaaatgttaagtgggtacttttcttgaacttcggtttctgagagaaacactgcacactgcacctttccttttcatggatttctgtgaccttacccggatttcagttaataacacatgccattctatcggctccgtcttcaatttagtcatgctcgaattatatttaatttttgcaaacttaaatttgaattagactttagtttataaaagtacgttaatttttttaaaaaattgaatttatagatttctgtaaaaaataaaaacagtaaatagacaaaaaaaaatttcaaacaatttttgagataatttaaataattctgattttattttcaaatatatttttaaaatattctaccaaaaatccaagcatactcttagaatgtttatgctagctttatgtacatgctggtttaagtttataagttagttaaatgttataagttgttacttaaaagtttataactttttaattatgttcttttatattgtttagttatcttaacagataattttattataataactcgagtttgtaaaaaaaaaaaaatattttcactgtagctaggactgatagcgtgacattgtagtataaggttatttttcatggtttttggcgcgattagtgccagatatggcgccgatagtgccagtagtgccctggaaaacacattttctctggattttggtgtggataacgcttgaactggagcgattagcgccagaagtgttccagaaagtgtattttctctgaaatctaacgcgatcagcgccaaaattggcgcggttagcgccagaacacatttgagccagtataaaaggccatttcacgcgttttgaaggccaaaacccttcttcttcttcttcctctgacccaaacggccattgatgaccataggagcttcataactcctccatacttcatctaaacacctcctaactaccaagaaacatgattagaaccacttatgagctagattccaacctagattcttaaagaaaaccaagaacctccattctctaaggaactgtgggaaactgagttttgggaggaaaagagggcgattcaagggcgccagagctgagagaacctcgattgtgttaaggtaagaaacttaagtttcaccgtttaatttgtgaaatttgtaataggatgaatagtaacccttttgtgttagggctggaattagacttagattctttagaaatgtatagttaggaggttgttctgagaaatatggaactttgaaacttgatttatgatgaagtttggttctgaccttgagtttggtatgggtaggaagaagattgagtgaatggaaggtattatgatatatatgaatctaagtgtctttacaaaagttgttcataaagccaaataaacgatgaaaacgtgttggtatatctgttttggctatgttggacaattgttgatttatgaactagtagatcattaattgaacctatgcagagtctaagagggactctatgatcttggttggatccaaatggatctaggtgagggtctatagatcacttataaggtggtttacccttgtaaccttaagatagaggacagaggggattttatggaaatgaatggtgttttcctttcattctaacggttgaggaccgtattgattgtttgttacatgcctgatgtaggacgtgagatttacattgtgggtggtggtgaccacgaaagtgggagagccggtattgagctgagagcaggtaagctcattgttccttggaatgatttcctttgcttgtgtgtcactgttttattgaaagcatgtacattatgatgagatgaacactatgatagtgttctatggttgatgataaactaaacactgtgataatgttatgttctatattgataataagataaatgttatgatagtattgtgttattgtgagattctctggccagtagaataagtttctatggattcccttggaatgagtgcccttggaggatgatcttccctaggatgtaccatagatatccatctaagacctgagcgaatggagagtccttcactggatgatcttcctcaggcagtggataaaagtcctgagtgaatggagagcccttcactggaagatcttcctcaggcagtgtgtgtgtgtgtgtgaatggagtctggagagaatgtatcttttggatagatgatatctccgaccatgtgatatgtacatagagaaatgtatatgtatatatatatatattgttattttgatgtaataatcgtgtcatatttatggaagtgaaccaaggggaggaaagacctccaaggaccctgagtttactgagattattatcatacccctgttggagctcatgtttgcatgtgatgatccaggagtagctgataaatctcaaggcaagaggcttgagtagggatagttctttgataaccttagacatagagtgatgaacatgttggctcaaattttgattatgcctgtatttaataccctgaggggatatttgtacagttttgagactattataccttgtatattgtaagaatttcccacatatgtatataatgtatagttgactttattaatgacgcttgatgacgtcatcttgtttgaagcttcttgttcttttatgatattgctgcgctattatgatataataataatgttaatacaccgggtgcatacgagatgttacatttataactttcaattttcaattattagttaatttgctagttttcagttaatattttaactagttttatcaaataccaattaattaaatacaactttaattcaatttatttttagattcttaggatttttaaaaaataaataactatttatctacaattaaactgaagaatatgctaatgtcattttgcgtatcagaaaaaaaattccttcttcctattttttttattaaacaaatggtaaaaattagatatttttatcccatgtctttcactcttccctttctattttcatctatttataagtctattcaaagaaacatggtgtagtgtacgtgataatttgatattacatccttaccaataattttgagttaattacgaaatcatctcccaattctttattttattattgtatgtaatgatcatataccatgtattatctgagaaacctcaatttgtcgagtgtgtagtgaatgattgatagccaattttttttttttgaaagttaacacacttgaatagtgatgacataattttgaaattttagcataccctgtaggaaagcttaataagatagtccaacctaacctaattaccggaaaaaatgaaatttgtcataacgactagtaactaatttttaatgttaatctctgtaagccaagtgagaatgggtagtattaattggattgaacttttttattttttattttttttataatgaatgacatgttatgtttagttgtttaggggataaaattaatttaaaattataacagttattaaataaattaactgttgacatttgagaatttattttatataagtattttatcataattttaactattgatttttattaatgaattgatttatatttattctttaaaataaagaatgtctttaaaaaaattgttattagcgttttcaagttttcaaattaagttgaggtacttcaacagataggagacaggtaatcatttttaaaaaaaatctaacccatattcaaaatacaaaaataaatcacttaaagcaatactaggattcaggcaaacaagaatactttctaagcatcggtcatcaaagtgtgtacttaattattccacattgcatattccaaatccaacattaattctcagagctaaacactggaaacaacattctcatgccttgaatggcatgtcattgattattttgcaagctctctgcaactgacctgctctactcatcacgtccactaagcaagcatagtgttcagaccttggtggaataccataattatgaaccatcaaactgaatagattcatgctttcatcaaccttcccagcatgacaacacacagatagtaaactcagataagttatgccatcaggttgaacactgactgtcaccatctggtcaaagatcgtgctttgtcattagagaccatgcggtgcatatgcagcaatgactgttccatgaaaaaaggtcccgatgggaaatttgtccaaaaactaactcagaatcaacaattccaccacatttgctgtgcatagtaatcagggcattacacattgacaaatctgaatcaaagccatggttaattacaagagcatgtgccttgcttccttcttccagtgatgcaagacttgcacaggcaatgaaaactgaaacaaaagtcaaatcatctggttgcataccggtcctgatcatttgtgaaacaaattcagtgcctcttcccctctcccattttgggcataacctacaaacggtgaatcaattgtgaaaagatggaataataaataaataaaaaatgtaatgaccagagcagaagcaaacaacctcctcctcctaggaccacaagtcattgttttttgctcaacaatttaatcaaaatatgctataaacggataaaacttttctaaattaagctaaattttagagcaagcaaggaatattcgccattcgtttttcttaaaaaaaaaagataataaaattatattagagttaaaaaaaaattcttattggatataaataataatctgtcttaaaagttaattataacaagtccttaattgataaaaaaagagagtatctctattgaatattactatattaatattacttatattacataacaggcagagaggatccgatttattttttcaaaagacttacatatatttacatgattattatacactttaatagaactagaaactccaatggaataagtcacagacagttaggcttctagttctagttgttattcgttccttttttaaaataagatataatgaaagctttcccatagcaagagcatctactggctgataaaaaaaagcaagagcatctactctagcatgcactttgaatggaagatgcagcagcatgaaatgagcagacctagctacatcatcattgtcaagaacagcagtgagaagtcttaggatgtctttgaccaagctggacttttgctctataaaagggttattctgaagaaaatctctttttttttttctttgatacggaggggggggcagaagcccctaatctaagagagaataaaacgtgggaaatgaatccctacaaaatcaatccaccaaacattatgaaagtccggaggaggagagttaaaaatatgaagacccaagagaagctcatgacccttagctgctaatctatcagcaacatgattacattcacgccaaacatgggaaagattaacttgccaatctttagctaaccaagatttaatctgctcaatcatggcagcatgctgatggttactattctccggacctttaatgagttaaaaccactggtttcctgtgaatgaaacaatgaaggctgggactttgataggtgggaaatggcccaaaggatcttcaaaaatgcccatttgataaatcacaatcttcattgtcatcccgaaggtctagatcatatgtaaggatacccacaaactaaaaaatgccattcaatttcaattcagactttggagaatcatatacaaggaaccaaacaccaaagacaataactagaagcctaactaccaagcttatttctatagagtctctagtttaacatttttttaaaaacacatctaattgaaaaacaaaaaacacttctctcaacaaaaataaaaataaatcacaaacacttttcagttataagctaactaacacatattggcgtggaggttgaaagcttgaaatcttaaagctcggcgtactcgttatgattatattccaagaaaagctatctctgcatcgaatctcttgaaacaaagtcttcgcgtcttccatcttcccttctttacaaaacccagtaatcatagcggtcctcgcaacgtcattcttctgcggcattctcacaaacacttcccacgcttcctcgcacaacccattctccaccaaaccattgatcatcacaacccacgacaccgcgttccttcgaggcatcgcttcgaacagcgcccttgcgcgcccaatccctccctccaccctcgcgtacccatccaccatcgcggtgtatgacacgacgttcggtcacgacatcgcttcgaagagcctctgcgcgtcctccatgcgcccgcacctcgcgagccccgagatcacggcggtgtacgacgcggcgttcttctccggcgcggcggcgaagtagcggaacgcgtcgtggaggtcgtcgtattggacgcaggcggcgatgatggagttccaggaaacgacgttgcggagcggcatggagtggaagagtgctttggagtgttggagaaggccgttttatgggcatttcgtcgaacagtttgcgcgaggcgtcgactttccggcgagtgagagggcagcgatgttgaggttcgcgtggtacacatcgcgagtggaggagaaaggagtggcgttggcgccaaaaggttgggtctatgagtgaaattgccacattcctaagtaatagtattatataatattttaagtaataaaatataagaaaaacactattcatttcacacttcactaatacaaatattggagtgaatggacgaaattatctcttttcccttcaaatataatatttcataccaacatatgccacacacccgcaaatggttttctcgaacttaataaagcattgtgttgtgggagtgtgtggggcccgttcgtctgtgactgtgtgatccaataagaccacaacgatggagaaggatgccaagtttcacacacagcactttttggcttctatattgtctgataacaagttcacggagaactacgtttagaacaacacagagaggctgaggaagaggtgtcaaatgatcattgaagggttaacaagtgttgggatagagtgcttgaaagtgaatgtaggattgtttgctgaatgaatctgagtccactgttggaagccatctaggggaaggagaattggagctttggaatgccattttgcattaagtgaattacttaatatctctctcgccattgttgtgaacagggtggttcagggtctgctttgcaaatatgagtgagcacacgctggacgtcgcattgaaagagaatagtatgcgatggatttaattaaatttagatcctagtcatggttaagtgtcaagtaattaaagggtttttctttctctcttttttaatggtctaaggacgtttttctttgtatgaaagtttcgttggaattctgtttcttgtgtatgggttaatacttgtattatgtgtcttggctgacaaaaaatggaacgaataaagaaagagtaatggtgttttggtaagtgctagctattattgtttctggcagaacttacaaattctttattctgggagtaacagcaaaacccaaaactcgtatcaggaaatgcaaatgtatactgaagagcagtggcggggactctggatcagtgggactaatttatttaaaaaataaaaattgataattatcattatcatatgaaatagtttgattcaaacacgaagataagaggtataaaatttaaagttttaagataaatatttgcattttattaaaataagagagtgcatttacttagtcttacatgtgaactggtaatgagattcaaatacataaaattagaaggtttaaaatataaaattatggggtgcaaaatataatactttttacattttattaaaataagatggtatatttacttactcttacatgtgaattggtaagaagattcaaatatataaaattataggatacaaaatataaaattatgggatgcaaagtataatattttaaaacaaatactagtttattgaaacgagggtgtgcacctacccaccctgactactatatagatccgccactgctgaagaggcagtagagcacattcattgcctgatgtagagaagtgtcttagttcttgtttgcttccattgcttaagcaaattattagaaggtccttttgtatgattaaagtgtctgaatacaatgactaatgttataagtttttcttagaaggtccttttgtataaatgtttttacacacatggtattttttatccctttctttcacatcatttttatctcaatttttttttctcatttctctttctcttataaactttataataaaattttattgtataaataaaattcctcttgtatattatttatgttctttttataagaaataaattatgatgtataaaatatacttaacttgtcttttataataaggaacggaggtaaggtactattagatagcttccgaggccgagtgatcaatggtttatgcacccatgtgttcgtgtgcttgcaaaccaaccttgatataagtttttcagtgcaagtttagaatagctagtttcaatgcctcctttgacctgatcaatgatatgtggaaaagtatgtgtcatcactcgcatcaggtaatactgatagagtctatttttagttattgcatgaagtcctaagaatatctttgcaagtcctaagaatcattaagtgtggttttgtaaattttacttttatattttaagaaaaatttacacatataactgcacttttttctaatttatattagtatttagagaataatatttaacacacatttataaattgaagatggatataaatagtttgacataatacaatattaaaatttgccaataaacattaaattggacagttttttttttaaaaaaaaaataaaagaaggtgacatgcaacactggacagtaatgagcgtgatcccaactattattatttcaagaatataatattaatgtaaatgtaaattaagaattaataaataatgcaaatgcaaatcgttccagcttaattagttaatatgtaattgtattaaatatttaaagaatttttttactacttataatgattttactcagtccaaaaatgaaaaatatgattaaaaaaataatgtgatttattaatatactctaaagataaacattattacaaaataatttaagttattcaaaattgaaactattagctgcattgtgtgtattatttatagttcgctatagtcagcatagtaagaaaagtttcttgtaaccccatttgacttttgtgataatcttacagtaattataaaaataaacattttatgtattatgaaatatcaattttagctttatctattctttagcttttttttctttagcttttaacatagtctttgtagtagttatgtataatctaaaaatgataaagttacatgtgactatcattgcaatgtcattatatacgtggacaccttccatgttaacaatgctacattaatagtgttgttataagaggatgaaagtcgacttttcataggaagacggatacctaccattcatatttttatattaacagcatatcaactatatgagtcatttcaaataagtgtaatcactttatcacctaatatctctacaagttatatctataaataacagtatataggtacatcttatcttatattttgaattagataactatgttattaaggagctcatttaatactcattattcaaatttgaatacatactctaatactcatatccctctaatattacactcaattattctcttataattgatgtacttgcttgaatttcaaagtgtttttcctttgttttacatattcttcccttaaacaagattgactcctatcggacgtgaaattttaagaatatagtattcacagtagttagctatttgttgtctatcagattgtattatcataattaccgcatgatatgttgtgcaatgtttctataaataaatatgataaaactctaaaattgaatatacagggtaagtaatttacttttgggttttgacggaattagttcttcccagaatacatcctcctcaatcaatgttattcaataccgtccaattctgctccaaaaaggtaaaattaacaatgactttcttttttttcagttttcaaagctatgaagtatgaacaaatatttaaactaacaactatcttgccacgttaccaaaacaaaattatcttgccacgaccaaacacatgaaaagtcaccatgcacccatcatgacctaaccttaacattacagagcaaaccaccaaatacagcatatagatcaatgaagcaggtggggtcaaattaagcaacacaacaggcagaggcaacaatctctttttccatcagacagcccatgccgcacaataaatactcttgtcctgtcgcccgaaaggtcaactcatataatgtgttgtattcctttgatctgagaatccttagcttccaaagcctgcatgtaagcctaacattttactcgttactttttaaagtcccaaaatcttacgtttcagtaaagtgaaagtagtcagcaacgtcaaagtgcatggcaagttgcaaaacagcagaacgcacggcttcagacgttggtgcaacagaagacggtagatggggtaaacaaagtggcaggtactgttcactttcctcaggtgggcagaaaaaagatatcacggatcggcagaatatgaatctgtacataaaatgatgccaacatgtcatacagcaagcccattcaataacttaaatttaatagcgcttgaactccaaatagcagtaaacagctattttgtgattttccaaaacaatcaccaattaaaataaataagaaaaaagactacattggctaaaaactagagagtaaataccttagaataagccgccttagaaatggatcacttataacctgcgcccatactaaatccatggtagttgatgagcaaagaattatttcccactcagtgaaagcattagcgattatgttctctgcttcattgtagacatcctacaggttaacacaaaattagaccaacaagaattaaaagttaatctgagaaaggttaaagattattcgtgcattgcttactgtatcagactcgttgggggagagaccaatcatttggcaaaatgctgacaaaggagcagtcaaaaaaaaggtaaattggcttccattatttgaatttacatcagatggattcttgaaaatcggtcttaaaggtgaaagaaatagagcagccgcttcacccctttcagccccatgtaaaacctgcaataatttatgacgtacacaatcaatcaaggcctgtcaaagtaaataaaatgggtcaatcaattctcaagcctaaaaaagacagcattttctaattcctatcaattccaatataagtttaacatggaacaagccaacaagcaatattaacccccccacaccttaaaaaaactaaccataaaatcattataacccagaaaaatgctgtatttgccattctttttgtaagtaaacatgaattgttgacaacggttctttctttccacccattcaactttgtcctctgagaaagttctacattcatattcaaatttttggaagaaattcgacaaggcaaggttttctgaggttagtgagttaaaattcaatttaaagtgttataacaaaccctcagactacaaagtaataaactaattgcaaatgtgaccaagccattaaaaagtaaaattagattcaaggaatatcctgaacagctccgcctaacaaagttcacaggcaacttatacacaagttctgagttttgacaaacctgccttgaatgcatggctgttatcactgtcaataatcaggaaaagaggtttcctagtgaaggggataagatcgccagggtagagattatttgaacctggtgattcaaataaagcacatgtaagtgcagctacaacatagatgattgttttttatataacatctaattaaaactaacccataaaatgaagagaaaatataacatgcatgtaacatttcctagaacaatctgaacagaaatttgacagagaatagactaaccactatttcccttgggaccaaaccacagataattgtcataatagctcagttctctcttgccattattttgagtttcggaaggtccagaattctgtccctgggaagtctgggaaaggaatttgtgtcttgaatatttggatgaactgctaaaattctccacttgagagacattattaagaccacccttccctgcatgagtgatcattaaggtaactaacctagtataacaggacatgagagagagactatacttgaaaagacagggcaaatgtaaacctgaggctgaaagatatactagcacaacacagtctggtggaagctcctcacaaattgtagccaaaacctgcataacatcatgaagtttatacaagaaataacaaattgtgtgttaaacagcctgagaaagattgcatatcaataggatgtaaacagccacttttgacaagtgaatattttggatatcaattcatgaatcagatcacacagcactaaggaaaaaacaaacccaaaaacaggtatgtgtgcacgaacagacaagaaagcatattatagtatacataagaaccaatgaagcacaccaaaggtacccaagaatatcccagtcctgataggagaagccataaaatagccatgaaatactatttgatattgaagaagcctagttctcagaactgcctatagattttagtaaatagacaagcaagtatgtaacgcaaactttccaataggctttgaaaactcactgctatcacatgtgtcacagatggacggtacagggtagcctttctaggattaggaggtatagttggatcagacatatctgcagtaagattcatgtctattatcccggaagctcctgaatgatcaattatgtcaccattctccttaggtttaactgtatgtttttggtagaatactccactaggctcccattctaaacattgtatcattctatagatgtccaatgtaagctcagcaaacttgacctgtaggtgagagaatatataaagattcaaaagcttcagtcctttcaggtactaaagtaatttattaatccaaatctaaaaacaaccttggcaacatgaatcagtattaacctcatttcgatgatagcttgtcaacagtgcatcttgaaatttcaaaaccctctttgcatgaaaacgagccacataaggaagagaagctcgatgagtatcaaatgtggcacaataacgcatgggcctgaaactaaagcccttgtcaactttcgtgaaacggttaatttctgtcaccacttgcctccattccttaaagttagtttcctgaaatgaaatgaaatgattcacatttataaattaaccaggttatatagatataatgttttctccagatgaaagtggaatacaaagcatcaacaaagtatattatagcaaagtttcatgagatttttttttatcttaaagaaaaacacaaaattcaatgttaataatgaacagtatgagtttaaaagtgaaattatataaaacaatcagattgagaagtggaagcttgacttcagataatcaaacgtgcaaaataatctaatgaagtaaatttataagtgatgaacacctgaagccaaacaatgcagtcttatgcagagatgaagatgaccaaggtctcaggcgagagacaaaaagttcaagtaattttacaaaaattaccaaatatagtcaataggactgttgtcatcatgcaactagttaagtaacattatttcaagcataacacttttattctcttggtctgtgatctacttatcaaatcaacatgtgtaatacatttaggaacttcagaaccttttgtcttgtcaactagctgcaatttgtttttattatcatgtacttactgacaagaatttcatatcatactttcaacaaatcgatcattgaactacgtgtgcataggactgtaggagcatatcaggtgtgagcatgctcttatgagagaactgattttgaccataaaatcataaatagatgaccaatattagatctaagtaaaacaatcttgactatcaatgtttagtagtatggtcaagattgattctgcctacatctcatgctctcattagttacacaccctatatatagatagggtttggaaagaaaatcatatttgcaccaacaatgttattctagaaaactgctctccataggcagtataacttaggaacttccgaatcatttgttttgtttagcccactaacaggaatttatttctttattattatatacttgctgaaaagaacttcatgtaagatttgaaaagaaaattatcaccacaccaacaatttattctagaaaactggcccctgcagtcaatatagcatagtagcgtacagtttgaaattcagttgatccagcattaatatggttctaaaatgggaggctatttcttttaaaaagaatcatcacttgcttttctttattactttaaaactgagtaacttcaaataaccttgatatatcctattcaagagctctcctgatcactttcatagttcatagttcatacaatagtcagaagtaaccaaaagagaatgttgctgctaaggctatgaaaataacctattctaaaacaaaaggaacggagagtttgcttaaacaaatatccattagatacccatcaattttatcccgtgaaatcagatgtcaatgaaacaaagattaaattactaattacagaaatctgctacagtgggattgccatcaaacgatgaaactaacataatttagtgacatggattctatccaaaaaaaaaaaacaaccgcgaactctaccaaccatatcacatggaagaacaaccgaggctaggtggggtcattacacagatcaagtcctcaagtcctcgcggttctgttctatcatatagcccagccaaaacaagagaagctattcgaatcatcctcagacgaaacctatggaccctaaaccaagtatcatacaatgaccaagaaccagttgattcagagcaacttcttacttaatctctaagttaaaagtattatcacttttcagcgtcgaacacaagaaaggaaacaccaagcacatcacacatcttttcactcctaacaacttcattgacaaaaacaagaaaataaaataactacacacataacacacaaatacaaagatgaagatgaagatgaagattagttagttcagtttgctttcggaaagctgaaacaaaaattaagtcaaattgagcagagaaacaatgcattacccgaaaggtagtcctgcaatcctcaaccaaagccccaaagcgttcgacgaggtgcttaaccatctcggtgcggttgagaataactgaaacgagcaaaaagcgcgcgtagaacctcagctccttggagcgaactccgagatctttggcgttgggttcggatccctggaagtaccttctgctgagtatggcctcgtagaagacgtaggcctcgacgaggaacctgcactcgctgctcctcatgtactgcccgaagtacagctgtccgattcggctcgcgatctcgccgatttcccaccgcttcatgccgcactccaccagcttcgcgcggttctcctgctggtacttccacagccgcgtgtacgccttgaacaccttctggaacgcgtggtgctgctggctcgcaccgccgccgtacgccgtcacgtcgcgcacccggccgaacttccggtccgcgctctccaccagcgcgcggaacgtctgcagagccaggttcgcgtcctcggacatgcctgccggagaatgagtgtttgtgagagagagggagatgtttttaggtctctgtcccgtgacgctcgtcgccgccggtcattggagaattcgagaaagagagtggtaatcagaaaatagaaacgaaatttgtgtgtgcgcgtcggagaaagagaggaacggtgaagactggagagggcggttacactttttgtttgtcaaacagtgtgtaagaaaagtatataatataattatattaaaattttcttttactgtatcataattatattaaatatatagtagaaataaataatatgtgcatattctatgaccttttttagagttaaactatcataaatttctcgacttccataattcgttatattaaaaatcatattaaaatgatttttaattaattgatattataaaaggagaaaaaatgtcattattagtacagtataaaattatctaattacaaatgtcatatataataaatttattaacttttacaaaattatcttaaaatcatatcaataataatttataattaagatgataatataaaattattttacaccattaattaattaatgtatcaccattagacttttataaaatgatcataatttatatttactaccaagtatacaaatcaattggtataaaatttttgtaatttaacaagtgattttaaatttgaattctaataccatattaaatattgaataaggagaacttttttaataagaactgagtgataatcatttcataaatgataatcatattaagtttgagttcagcaaatttatccaaataaaaactcatgtaatgaatgattaaaattatttaattttaacaattattccatattcatcctcatagtcgtatccattgaactaaaaaaaagactagtacatgtctcattattaggctatagagtacgcactatgcagttgttgttgttttttaacggaggtgtgactggtgttgagatgtttctttaggggaaaaaaagaaaattgaaattgcggtttctttcgcttttgctttgtttggttttctttttggctgtttgagatagaagcgaatgatggtgttaagattttggattatttgatgaagggactttctttctagccaatttattttggcttttgtactagagaggcagcaattaattttcatttttctttttaggttacgtgagaaatgaaagcaatagcaaaacgaaggagctagaaatgaaaaaaactacggccttacaaatgaaatcccaacaacgtcagccaaaacaaacgttgctatgggtttggctctttccaactttggggacagctctaataggccagaaattattttattatcacgagtttattaattaattacctgtatgtagattaaacaaatggatgaataatgatgctcagaaaaacattggtgtctgaagtctttttcagaatttttcaaagatcaacgtaattattatctcaattaaacaatactagtattacttttaaatgtggtaggttctattattattattattatttttctagccgtgtttatacgcaaaattagtcaaactttgaaatacaggtatatttcaataaagaaactgttctggtaaaccaaagatagagacactctttctttaagttccctgctggcaccaaacgtggaactaatttctttttcgtgaaaaatgtccaactaattgcgaacgcttgctccttctctctctctatctcttcatgttgcgttggctcgtatttaattcagccatcgtccattcgttacaccataaatgcagtttttaagtggtggaccttaattgattaatcatgatatccattaatttggaatttagttatatgtcactttcacgcatgtatttacacaactgatagaaacttcacattagagtatatactatagagctattgttttcaagtgtaatgtacgtttttaaaagaaaaaacagtgtgatgtacgtacatttacaacaacgattcagcagaattagatatggtaaagtttgtttctgaggaatatatcaccatagtaagttccaaataatgagtaaaagttaaggatgttaactggcatgcattcagaaagtttgtagtatattttaatgtaacattttgtttctggtaacccttgggtctaatttgctcatagtccgcaattgggttggtgtgtgaagatttgtgcataatatgcccaatgatattatacaataataatcttaatcattctctaattgctcgcaaaggcatatgagttataataattgggttatgaagtcggaaacaccctagcaattgctgaatgatgtcaagcattaggaaacaccattcacagtcttccttggttgttttgattagttcaacgtgtacagattggaaattcttttaataatcgagaacatgccacactaatgaaaatctgagcttggaatttgggaagaacttcaacattgacctgggattctaggtaataatgatttctctttttccacttttctggtctataaagagatggtcggtaaatcatgatatttgcggtccaaattaaagcagtcaatttattaatgtgccatatatttgagtgagaaaactttgctcgtgttagaaatggaaaaacatggggcaggtctatgtttaattgtagccatgtgtgatgatatatatatatatatacaactaattaaactagtaattagtaaactcgttttttttctagcctcactttgaaatgcctaattagaaatcgatctagataattgtggttataatatgccaaatttgtgtcggcctgattcactgtgctcggtgattcacaagtttagaactcgacaaccatcatgtgacttggttgacatcattcactatctcatagcaccatcaaaataaacagctaaaatacctttgacagccaccacacgtcccgaagttggatgttgtgggttcagaattcagatggtttactacgttgtacaaaattcgtagaaatcaagggcatgcaggtttaatttgaaaagaaaagaaaaaaaacaagtttttaactactaattgtaaaatatcatcttttttactttattttttaaaatattacaatgagaattattaaaatgaaaatattatttttctattttttgtacatttataaagaaaaaataaggtgaaaataacgtgatatttttataattttatttttaaaatagaaaatattttttcaggtaaccaagaggtttcgaactcgctaaaacaaaggcatagggtgtcacagtcaactatcctctatcacaaggaggtttttgtaagattttcttcctcttctttttcatatatataaaattgttaaaatataaattccaccgcatcaatacaacaaaacagaattggtagataagggggtttggtgaaaatattgcgaagttatatatacagcatattcggacattgataacaaatctgccctgtgttgtatgcataatgaagctccacttgccccaactgttgctaatcaacatgcaattttccccataacgggtgggaatggaagtaagtgctttacttgaagagaaacaaaacaatagctagcttatagagtagagtagtattagtaaagttcgatcatcaatttggaaaaaaaattcaaacaattcgatccgttaattactttttagattcttaggtgtaaatgtaatggaagcatttttcaattggttgactttcatagaaaaaggcgcatgaggagcctgaaatctatgaagagtgtggccattatattgtgcccgaccaaataatttacctttttctatgtttccaaattcatccatctcgatcattggatttcttaattttcccagctgtctacccatcgttaatgtgcaaaatgtgttgatctctttccgccattatattgagtggttaaattcaattactatgatgcttgtctgatagattaaacgaaacctctttcgtccacacaacttgttttattggttatatatggggtagtcatatttagctacaatttccatccaacaattatcaaagttgttgctgcctacaataaactctggagttgttgcatcatgatgagtgtttattgtcctgtttgggtcactgggcccatggagtattattttatcatatttattattaatacaaataaaatacatatattataatttactatatctttcttcttcttctttttcaatagaagagctgttgttttttggactgaatgagatgaaacttaaaaagtcatctaattttggcccatcacttccatcgtgggtttttaagtttcaaaaaaagtcatttactcttgctttattaggtagaacctttccctactcactaatatcttgttcctttcatgggacatgtccggtcatgctacaagccgaaaccagcgttcaaaaatatatccacttttcattcattcaaaccccagttgagaagcatatgaatattttggggaaaaaaattaaaaaattgtttttttttttaaattacgaatttattataattttaaaagtatttacgcatttatagcaacgagtcgcgcctcccctgaacgtgactgattccgtcgctatcaccttttgcgatcacaacttctgtcgcaaacagtattagcgactaaaatagagactgaaagtatcgattaaattttattgaccaatgttttttttaaaaaaaaaagattcgcgccacgtggtaatttttttattgactaccctgctcccatttggtaaataaataaaaaaaatgtccttattggaaacattggaaaactttaaaacgaaaaataaaattaaacctaaatataaaacaaatcaaaagatatatttatatatttattttttttaagacataaatatatttttgatttttagttaaaccagaaatgcaatctaactacaagtgttagttactttgtcatactcaaacttcagcattagagtcttcggcacttcgcagatatgcaaccttgctaaagatcaatagcacaaggaaaacatgaacgcatgaagttggacatatgtgcaggagaactacattgtagaaatcgtgtgactgatcactcttaattgtctaaagctgttcatacatcaaatgatttttctacacatacttttttttagtgttgatgaatgcttctcaacaaacttattttttattaaaaaaatataatcaacatcttactgagaaatagtatttaggaaagaatttaattagaatatattaacaatgtaaaattcactattaactaattataaaggattatgtatggtaaaattgtttatcttagcaatgactagaatgtgaacttttgtgaataaataaaaaaaaatattgacatctttatattgttagaaagagacctcgtttcaattaattttttttgcaatagctaatcaggtactttttttagcgtattacaatagaagaataacatgaatttattctttaataaggaaaaaaataagataactgaatccacttattttgtgatacaattacaacatttgatgatgacatatgcacaatttataaacaaagtatgtattatcataatgtgtgtataccgtaataaaattttacatttaattaacgtgtaccacaaaaaaaatattttcttttatctaaaataaactccttcagttaatgattctaatacaaatgttgttttaataaatcaactcatgttttatatttggtaggaaatgtcacaacaataaagtcaactagcaaattctataaatttgtatcatagataatcaaatttacctatgtattattagtcaaagtaaaattaaacttgatttttttaaataagattttgagttcaaacttcactgaatgtgattattaagtctcatttatatataaaaaaagttaatcaagtctcatttatataaaaaaaatatattttggaataggaaaatattatcatttatatgtacttcaagcgtaattttaacttgctatactaaaatagtaaagtcacgttattcattacttgcttactggtataatagttttttttattggtaatttactagataaccctatagactatacaaaaagtaaaagtggattaattaagagttacacttttatgtgcaacttctctaaacttagcatgatttgcgctttctaattgattacgatgactgatttaaagcagaatttagaaagttgacatttctttcagaacttatcccttatcactatttaaacttacgttcctagttaatctgttcccaaatctcaagtgcgttagtgaaatttcgcgagtgacacggcatccacaaaagagaaaacagaattggagcataggttggagggttggagaaatagaccgcaagctcgctttggcaatgttgtcatgtcacacacacacaaagaaaaaggcacacaaagtagaatccaatggcagttaaaggaagtggggataacttttctacatgctcattgtggttcaaagaatcttcttagtgttcacttgaggaatcaaaagagggggaaggtaggcctacaaaagcatacctaatgaatgattatgagagtgaagggaagcttcaaaattcggcagtttgtgttactgctgtcctctctaacattaattgtccatggcttgtttgcctttgtagtgcaaagtatttattagtgatagttagtgcccaaaatggaacaatagcacatttgttaagtgcccaaacttgagctattaaatgagagtgacttttgagtttacctttagggatcgtttggtgcaaggagaaaatttccatgctcgagtatcattgtttattggaatcatatattttgaaaatcatatttcataaaatgattaaattgatttgattgatcataaatattttcatgagtttcataaaaataaaagagtaatataatatttttagcatgaactttaaattattttaaaggataattaataatcaaagaactgatacaatcagaaatgacagaaaaaaaatgtaaactaacatataatcgagacgtccttaaaaatcatgagtgatttgagttgtttattggtatatcaaactcaaaaaaatagttgttagttaagctttacaatacacttattttaccgtaatgaaatctttttattattaattagatttaacgtaagtgcgtctcataaatagtaaagtttcacaactatctctataaaactatgataagaaggttattgaaatttaaaataaatttgcactctcgattaattgctttctccattaaagtgaatgatgaaatctgacatcttgaactatctgttgcattctagaacttaggtttaaggattgattaggagtatgaaatgtatgaatactaaagacatctattctaagagtgacaacttataagtttaacgatagctctaaaattgattaatttgtcctttataaaagaactatttttttgagatgtaccaatttgtcttgcgtattgttaagaatgatatatgactgtcccagggagtgggtggttaaataaccgttattttatagagcagatttaatctccataatacattatgataaattgaaaattctagaaaaaaaaaaggtactgtacaaaagaaagaaaaaaaaagattttttttatttatttgaacagcattaatagttatccttgtaagtggaagcttagtaagactaaaaatgaaaaaaaaataaaaggactataattgacaatacaaaattacaagattaaaaatgaacaatttttttttataaaaaccaaaattgaaaaacatgaatctataggaattaaaaataaataaaaaacgtataggaccaaaataaaaaaaattgagaatttataggaataaaaaacatattcaagtctttatttaaaaatatataagtaaattaaatattaaaaaatgaaacgagtttttggagaattttccataaccttacaaaacccaagaaaatgaaattacatttaactaaactattttataaaccttaagctataatattttcacttttgacggagttaggatgaggagatcggattgtcaaatccgacctcgttctatcatgttaccatgcatacttttatatcatttttcatttaaaatctatcataaaattttaattacttaaataagaaaaacaataatgtaaagaaaaagtgataaattggagttaaatattattaaaagaagaacaaaatacatgtaagttactgcaaacaggaagggaatgatgcgggccctggaagcccagatagatatctagtccgcaaacaaaaataaggcgcgaagctcagagggaatgatgcggttcgtattgtttacgacattttaccagaaaagtgagtcatcaccattcgccactgcgattcatcggagagagagatcttggtgttttacctaatctctttgcccctcagtgggtatggtactatacacaccattatgctattatgctattttgctattatgctaattggtttattgatgcttgtcttctcatatgcttgcctacatactaagcattgcaaggaaatatttgaaaggaacttacaaaactgaaaggaaaatttgctcatttatttatgttattgttatgttattgctctcttctttttctacttgtcttctcatgttttaatgtattgctctcttcttttttttattgtaccagatatatgtacttatttttcaagtgcctgatgtttttcatgttttttcatacctatacataaatgttcacttttttcccataagccaaactaatgaatcattgacagctgtcaatcaacattttttgctttcattcctccctgttagttcttttttctgatttggtgccttacatgactgatagcagcgaatggggaacattgataatgctgtccctttctttggagttaagtttaacagaagctatccacttattatggttatatactcccttttggttgcaagcaatttctttgatagggtatttgattctcttgggagctggaagttatatgttttcgaaactgaagctgaagatatggatgggttagatccatcaggattaattatcttgccgaaaggtatgcaagctaagaattctgttattgtcaaaactttagttcaaaatattaaatgacaaatgatgtctaaattagtgaactttgttcaaatgtgggatttgttaattacttatgctgattatcaattcatataaatttgtagaaagatattggcttgagcaaggatgcaatgtaagcgagcaagttgttccactagtgaggaattttaattgaattgatgttgaatctggcgagaatattatggtatgtcaacaccccactgaaaagaaaatagaagcaatcttctttctctattttcatctttcatgcaacattatcaggactttgatggctgcaagatatgacatttgtaagtcttcttgttgtggtcaaagttcaaacagttcactcactttatagctgatatggttcaggtgaagaatggtgttgaaatgaagggaaattcttctttagttaataaagaaatagatggaaatctgcctaaaaatttgaagagacaaggagatattgctcgagcagggaagccatcagcagcagagtggattaacatctaaattgaaggcagaagagaaaaacttagcatctgctagggtttccttgcttgatcacggcaatactcattctagtaatgctgctggaacttcaggcttggcttcaacatggcaaacaatgaaaacaggttttcggagtttcggggctaacttagggggcaaaggatttttacccatacggcaaacacaggaagctaagatgtctcgtgtgtcctcatctgagtcccttgatgatatatttcaaagactgaaacggcctgcattggaccaaaatattcacaatgacaaggattattttagggggggcaatatttctggtccttctagatgatatccagaatttgggcgagaagttgcaagtgttctataattaatcatatgcaaaaacatattatcatgtacagtttcttgtttcctttggtagtttatacctcaaatgcattttaaagatagatagaaagatagtctttgatacaggaactcatactcgttacaaaatcaatctcacattaaatgtagattatccatagaaagaatacttaaatttgcaccattatacagcattcagatatttgttctgttttgattcataatcttatttcactacccgcttagcaattagcatacctctccattgtacattatttacagatctcatgttttgctcgtgtatgtacaccctgatcacagtagatattaaaaatgactagtttaaaacttgtggagcaatgggaataagggttgccatcacatggtaattgttaaattgcacagctgcagaaaagaatgaaatatttgtgaacatcgaaatgtaaagaaaaccattaaaattcccggaacaagccaataatcatcttaacaatagaagatcgtgctcatcccatcacccatcctctaattcagaggagagttcaattttgattcacaatcatgtatagttacatcaattgaaaaactggatataaattaactaattaaaaatgccaattctttccctccctcacggtcctggaatgcatgaaggtctcttgggtgttctttttggtcaatttgagcagcttggaccaaataccccttttcttacttcccctgttgctcccattgacttccctatctatggcttggcttcttgaagcaaaggcaattgagttgctcttctccaacccataattgaagctaaccatggaagaagcagaatccattacgagagagctatggcggcggtggccacgagacacataaggttgaggaggaggagggagagaataagttggattgctgttgtcatagagcttcaatagtttgtctcttaagcaagagggacaaacacccggtagttgcttgttatttgggtggtacttacaccctcctcctactgcttctaacttcatattctaatggtacttgttttgttcatttttgtgccttgtctcaatgaatttatagattcattagttgtagttgcaatgcataggaaatgcacgagtatacgacttcctcgaagtttcttggtaatacaaggaatgatggcagcgaatcaacttctatgactgcgtccaatctaatcgtatttctggatgttaattttttcccttaaatgatttttttatgcaatcttaacattaaaaaattgatgtaaaccaatttaaggaaattgcatccgtggtcatcataagattattatgaataatactagtcaaaatcatttcttcattaaacttataaaattgattccattttgaaaaaaaaaaaataaatagaatgccatgtgtattgtgtatctagggagaattcctttacaaacaaaacttccatttcaccaacgtcaagacttctataacgtggtttttgcaaaaggaaaaaatctcacgttttgaaaacggaggctaggctataacgagaagttaaatagactaaatagaattttcatattgggtatctgctgattttaactaatttccaaaagaaaacaattttgaacatattaattttgggttaattgattttgaacatattaatttagtttgacagtttgtaggttttggttcaaattgaattaatagactaaatagaattttcattttgggtatctacaaatttccaaaaaatcaattttgaacatattaattttgtgtaaattaatttttaaaatattaatttagttttgtatgtttggttcaaattgaattaaattaaattaataaaatttaatcatctttgactcagatattgattttgtgatttaaattttgatgacgggttacttgaataattcattgtggttggttaaaccagaaaataaatcagctgtgattttttttttttactggaaatctgctgtgaattaggaatatgattatgtatatgtacatttctgatttttttgtattattaaattaggaaacaaatttgctataaattaagatgtgattgtaacatatatttatgatagcttgtgtattattcagaaataaatcgttaaatctgctataaattaagaaacaaatatgttgtaaatctgtctatctctctatctgtataacaagacttttgactaaaaaaatgattattgaatcaatcagtttaaatatctacttagatttgatttcatttttgcttataacgtacgtatggcatctttttattaaaaggaaaaaaataaaacatattttttaatggaattttttatttatctaacaaacttattaaaaagtggttgcttgaaccaattaacttgaattttatctctgtttttttaattcaaaatataaatcaaacttgttgaaacgatgcaacaaaacttgtattaattggattaatacaatatgcgtttgacagaaaatttataaaattaaactaatttatttgaattgattcgaattatttctttcattaaaataaactaaataaatctactaaaatcggcgtgaaaggtttggataaatacgttttaacttcagtgtcaccattggaaaaaaaaaaaaaaaactaaatcaaccggaagacattcataaataattattatataattatagttgatttccctttatattttatagatgcattatttttttgttttaacaacttttcttacttaaggggtttcctttaatatatatagatatagatatagatatagatatatgcttcctaattgaccattaacttccaagttccaagttaatgcatttgaatgtaaccttataacttaaaaataataattagaatgtaacaaaaaatataatgcattagaattaaatgacgcatttcagtcatagacaaaccaaatactgtgtgtggacagtattacgtgaagaatgtttcttcaaagaaactcacgaagacaaaggcagctaaatcaacgtttgtcctttgactatgaagaagaatatgtagcaagtcaaggtagcgcacgtgagatgattaacagaaaagaaaagaccacccacgcaaaatatcaaggtttgtctaaaaaacaactctgctaattgtatgtctatttttaatttaattttaaagtattatatgaaatagacacactttaatttatgtatgggtaaaatatgtttgactttattgtaaaatttagaaagtattcataaaaaaaattatattaatttaatttgtgtaaaaataaaatatttttttattagtattgaatgataattctattagatggtaatttgccataattagtaaaattacacgtctaatttaattataaatgaattaaataatttgtaccaactaaaaactttcaatttggattaaacaattggactattaaaaaccttcaaaaattataattattgttactttttagacgattttcttacactttttatgagattaagaggaaaatgtaaaaacattagattgggatatcttttgagtgtatttagaaaaataggaagaaaatacctaactctcttaatcacattagaaattctctaatggcttgaaatcaataataaaaatatgtattattattacaaagaatattaatacgatagttttttattttttcaagaatttcaaatattctttatccgtattttactatcaatttattcttattaattggtatctgaataatattaattaaaaatatttaattatctaaaatataaatactaatattttttgtgttttaatataatataatataatacaatattttttaactattaattcatattttaaatatactggttaatattatttttgaagtttactccatccgatctcatttattttaaaaaaacagtgtattttaatcctaaatataagtatattttaattatttttgtcttatttatgtttgatattaaatttcaatcaaagaatgatttagaaaaaagagtttattttttaattaaaattcacataatttaattaacttaactatttttttaataagcgtgtttctttgtcttataaataagataagaaaaagtgtcttatataattttttaaaattacattacgatgatagattagattgctaagcaatgaacctgcacatcaggatattctcgtttattgaaatggtcaaggaaggagacatattgacgtaaaagcccattttggcgatcgaaattcgaaacactgcttaccgcaaaatataaaaaagaaaagaaaagagaaaactgtcaatgtatagaatagggatgttgaaaatactaggtttccgtaaatttattcaattcaatgtaaataataaaattattaaattcatagaaaataaagattgaattattatttttaaaaagaggactaaattaaatttcatattaaaatttgaaagttaattcaatctacttcaagtggaacttataagtacacaagattttgtttataaaataaatatataacttgtataagtaaatatttatgatatgactacgctgtttttttatggtttcactatctaaattgggtcttattattattattattattattattatattttgtgtaagtctattaattatgaagaatcggtttaatttttttacctaatattttttactatataaattttgtatttcatattgaagaataaattttaataaaaaaatagatataagaaatacaagaaatggtttattatataaatttggtattccatattggaaaaaaaaacagtttcctatgagtagctaattgtgtctttgagaaaaataaaccattcgatgtttttttaaatttcagctatggctcagtgtttaaatatttgcaacaaatgacaaaataatggggccgttatgtatatatttttggttgttagaggttcaaagatatgcttttgaggacccataaagagggtgggcctgatgggctcttcgaatgtcataatgcgggcctcctctataattcaataggtctaattcggaaccgtccgataaaatcgaatattatctatcttagagatatatcaagggataaataatcggaccggtccttaaatttttttaaggctttaagggagccgtatgaggtgaaaatctcatgtacggttctgtaatagagatggtaacagtaatgttatcaccgactaggattatctaacagtttaagtacagttgatatagttgatgcacaatcaaaatatggtttttggggatggaatttgtggcgtcaacctatgggtttcattgtttttctaatctcttccctagcagaatgtgaaagattaccttttgatttatcggaagcggaagaagaactagtagcgggttatcaaaccgaatactcgggtatcaaatttggtttattttatgttgcttcctatttaaacctattcatttcttccttatttgtaacagttctttacttgggtggttcaaatatctctattccatacatattcgtttctgacttttttgaaataaatcaaacatatggagtttttgtaacgataattggtatctttattacactagctaaaacttatttattcttattcctttctatcgcaacaagatggactttgcctaggctaagaatagatcaattattaaatcttgggtggaaatttcttttacccatttctctcggcaatctattattaacaacttcgtctcaactgttttcactgtaaaaaaaaaggtggaccttatatattcataacttgtgtcaaacaagagaaagaaaaaaaatattcagagatattcatgatatgttccttatggtaactggattcataaattatagtcaacaaacagtccgagctgcaaggtacattggtcaaggtttcacgattaccctatctcacgcaaatcggttacccgtaactattcaatatccttatgaaaaaataatatcatcagaacgtttccgcggtcgaatacatgaactctacgaacctaaagcaaaaccttttttatttcagggagaaaaggcaaaaccttaatagaaacgacctttcttatattaaacctttatgatatgataatcctatggcggatattgaacatgcagctccttcctagttattagatagttcagatcaccacttgcctttgatctcaattaatttctacttaaatagtatatatgtaagttttttaatttataaaataataataacatttgattacatgctatgcaaaaattaataaaaatcattataatccaggaccaattaataatttttcctccatcagagtactttgaataaagtctatttaaaatgatacaaggttattcagttgtcatatcagcttaatcactgaactttttaaagctggctacaccacattttcccttgaatgttgcctttcaaactaatacgaagcttccaaactatacttttgctaatgtaaagtacatttcagtgtcctcatcttgaaagcctcacgggaatggattatcttcacaggatatgttccaagagaacgacacaaattcaagagtggcttacgtgatagatagcaattcataacagatccttggtcaatggtcaaaaatctgtctggttgccttagttttgagtaaatgcttactaattaataacccaactacactatcttgatcttgttgtattaactaaagggagaatggtcctaactttttgggtatgccatatttataatatcgaaattaattgtttaacagtttgcgcataacatgataccaccagctaaaaaattaaagtatagaatttgaactgcaattacctaaagatgcaaattaatttctaacactgcatataatttattataatcttaataacttattttacaattaacaaaaattattacactttttttaaaaagtgcacctcactctaataaaaattagaaattaacatttcattcacagtaactgtcaaaatcaaatgtcattaaaaatagaacaatgtttacttaaaacaaattaaattaaaaaaatctacaattcttttttctttttattgtttatcacactattcttcttatcatacatttctttcttatttttctcttaaattgttagattttttttctctcctaaagtataagagttgtgaaaataatggtgtaaaagtaacatttatttcttaaaaatacagtaatataataacgaggaaaatgaaatagggacaaatataaggaaaatgcatgcatgtttttgagtccaagtaataggcaattagaaatgttgggttgggtctatctagcgtttgagcttggctgaaaagtccgttaagttggtgggatccaatccaatgggccaatactactccagccttctcaatgttgacctgacctgaaagtaaaaaataatacagagaaatccaggggcgtagggtttgagtgtgtggacagtggacagtggacagtgaacagacacagatcaaaagaaaagaggtgggccaacataagaaaacgacgtgctctgctgacattagaatcttttcagtcaccgtgcgtggccgataagttagagccaaatttcacaaggaacctgaataaccaaaactaccgcatgacgagaatatcatcaccacgtcagtatataaatcaaaagatgttctcaccgctgattcgatgcttagatcttttagctatgatttgaaattataattaaaaatattattttattttaaattaaattttcagtctttagctctcttatttatgatgaaaataaaccttcattaatctgaaattcgatcagaaaataagtaaaatttgacaaaaaaattatttttactaagaatcaaattcacataatatacaaacaattcaattttaattttaatacattaatcatttttgtctaattactttatttattttaaaattaaattgacatgatgaaaaaaaacctaaatacattcttattacacaagaggaagctaatatatatagaaaattagttatttttcttcacatattttagtttgaagatatttttacttgagatattgtatgacattaaacgtgtatagagtttttgatttctagaaattcaaattttaatttgtcatataagagacaaatgtcttttattagaaacttacgattattgctctgacctcatgacataatgcttatttaagaattagatatgaaaaatagaatttaatgtttaattctctactaaattatgatttgtgtaatatgttggacgaattatatcatattgataaagattcaaagactgtgtacataggtatgaaactgtacaattgattatgacttaacaaattaatcggtaatacatacttatatccataagatgtatctatttttcgataatttattatttaaaaatttcataaataagcgtgtttaggttaaagtaattatgagataaataactttctaaaaagtttcttaagaagtgtgcaaataagaacaaaacacattaaaaagtttcatatttatttcaatgttcattgattttagaagcaattagaataaattgtcaaggtctaaaaaaaaatatctataaaaatttttgacttaaagtgtgatagagatcaataactaccaatagcatgttgtatccaaatacttggaacataaagaaaaataaccaattttctaatccctattggatgtagaaagtattgggtggattgaaaagtcattcttgcttttcttattttttcgcatttcactttcatgacctctctcatgtaacgtttagatgtgacctaataagacgctctctatatagttctggggtctacttgatacttcccaccaaccatgttcatctggacagtgagactcagcctccttgcacctagactctttttaattaacatgcaccttcgaagtcctgtccaagataagcatccatgcatctttaatggacgtcaccttacataacaacaagtcttaatattttatatgcttaattatgttttagccatacatctaatattattatttggtagttttatccttgggtctatttttcaacttgtcattcatgtcttgcaagaaacagatgggagtagctatcttcctgggccatagttcaacttcaacctcctcagcgccgccgcttatggaaattttgtagtcaccgacgaacatacaaaccccacataggataaaacccaaacataaaatgataaaacaaaagtcacacaataaccttaaaatcccataaatttcgacccaattcatcatcttcccattacgattgttgatggagggtatgttgttacttttttttaaaaaaagaatgttgttacttgttagtgattgatgaacttgtaaagtgggacttatagatgttacttcggcagtgtattttttaaaaggaaaagtataaaattatatttctaaataatttatgtaagatttttaatcaattgccattctaacgtctgtctaagtataaaacgagttctaaaatataaatcttttaaaattaataaagaaaatttattaaaattaaatacttctgataactaattttagttttcaattaatggagagaataaaagggcaaatagatgtcaaaccttctttatggaaaggggaaaaaaaggcatcatcatatgagaaattttatttttcagaataaaaaaaatactcactccagttactattaatattataaggttgaagttaaaagtgcgatttaatctttttcataaggtctaatctaaaatatattttttttgcattgtttatttttttccaaaaaatatcattaaattcaatcctaaaatagtgtgataataaaaaagcataactcattaatttgttatgttcacaggaataattttgaaaaaatattaacttaagataaatttaatgttttcaactaaattaaataacttttttaacgataatgagtttagttaaattagacgttataataataacatgcaggagtatttaattaaacatattaaactaatgttatttatcagatattttttaaattttgtttaaaatataaacatgcagaaatatttttaggaatgcgtttaattgtccttgcttaacccataacggctaaaaacgacctaggggctggtgcaccttgggtgtggaagtttggctatgggattcttaagcccaatcacgcatccagcaaatttctggctgcagaaactgaatcctacatataggcaaatatagttattaattataagtgataatttttttttaaaatatttaatataattatatagttaagattcgattccaaacttctgatttaattaaaataatcttatgttagttaattcacgtgcttttaaataaactgcttcctagtttgagctgcagttagtcaacttgtcttagaaaaacaatttttttatccttgttttagaaaaataatagtttatatatttgtcaatttgttgaaaattatgattagtttttcaaaattaatcgcaaccaaatattgacccatccatgtaagtggaatcacttccattattagtaaaaactactgagttaatggatattaataattagattactgatcacatgtagaaaggaaggacatctttaattatatcatgtcaataatcaatgcctatcataataatttatgtttgcatcggatgacggtaaccacaactaaattgccagtttaataacactgccacatgtccattttgatgtgtgctcgaaaggtttcttgacctaagtggcaaatttggtttagtttgagatctattagtatttagggaaaaccaggttaaatatgatcaatcaatattattcatttcttttccaacatatctaacagctaataccaaaaggagtatacatgaccccttctttaaaaacacatataacttttttttttttttgagaaaaaagaaaacaaaacaaagtatgatcagaaaacatggttgtgtatagtgttagaatgataagtataggtagaatattatagcattagaaaaatatgaataagcttaataatatataagtgaaaacgacctatacaagattcatttggaggtaaaaatataataaaatagattaagatatgaaagcacaagaacatcatacattaagattaagataagataaactttaattatatctaatagtacatagcaattaataaataagataactttattgaattatcttgcctatttaatacagactagataatatgatgaagtataaattatgttcaaatgataaaattattatttcattagaatataactttttaaaaagtaactctcaatttattttaatttttaaaaaatttcaatttaaaaaaatattttttattatgtagttattttcttaagattaaaaaaatatttgaatcacatttttaagatttcaattattattcaaatatttgaataaaattatttaactttttaatcttaattaaaaatatactttaaatttacatgttgaaattattatgtaagtacgtaagtttgtttgatggttgggggagggaaataaaaattggagttgtaagaaggttatgaattcaaaattttctacttacataataaattttctaatgctaacatttaccgatcaaaaaatatattaaaattattataaatatgcaatataattttataatatatatatatatatatattaatatgtatattatatactatatattattgtatatattatattgtgacaagttttatcatatcctttaactttttaacgcatgtcaggttccgtatctcaaataaaaaaaatattattagacttacaaggtaagatagaaaataagataaaattattatatcctattgatacaataaaaaacttatcaaaacatgataagataaaatatatcctattttatcttataatatattaactaccaaacggctgtttaatgttaatctggaagaaaaacggaaagggaccgggaaaaaaaatgaatctttccactatgacgttttgtcaaggaaggaaagaaacccaaaaaagtaagtgggtctaactattttataatccatccattttggaaaagaaaagttggagaaggtagcttttctgaaataaaaatgtaaaagtatcccttttttattatacatgttttttctttttattttattcacaataacataagaaaaagtatccctttttttttctttttttttctctcttaccaaacaatctaaaaactattttattttactctttttctttgtttcttaaatcaaacaaagcattaatatataacattttgaaatagatatatgaaatttatttatataatttgttcatagttcattcatgacattatccaaagaaatgttacgtatactccagttcattatgatatttgtatgcggtaaaatatttataatctacactatctttttttttttttacttcaaaaaatctaagttatcataagtaatgaacattattaaaatttaatttatcatgaattctaatgcaatactccagtctccaattaagacaaagtatcttgctatcaagctatcacattatagatcttagtgcctatcaatggggccctattttgccccgttattatatgttgggcccacttgtccctaccacccagctgagagctactttctttatgggccttacctaaaagagcaacctttatgaccttccagatgaaaaaatctcaaataaatcagagtactacactcacaattaaattttgatttaaattgtattactaaatattataactttaaaccaagtaattgtgtagaagtaattaatatgttaaaattaagattgaatcacttatgtagtagtcaaatttaattcttatcaaaaataattattaatcaaattttacttatttcctaattgaattctagattagtcaaaattttatttctcctcatgaactaatgaagggttaaggaaaaaatattataactttagtttcatgaaacttacagttataatgttttaaaaattatagtatttttctttaatttgtgttttaaatcaaaattttcaagaaagggtgtttatagtattttaagtatattattcaaggtgtatgtgaaaattcttggtttaattagtcatttaattcttatacttatataatttttatattttaatccttatacttaaaaattactcatcttaattcatacacacattttaaaatttgtttttgttggttatctaaaattatagagactaaaacgaattaccaaatatatgtgtaagaattaaaacgaacagtttctagacgcagaaactaaaacgtgaagattttataaatatttttttttggtgaataaataaaagattttataaacatagtcacaaataaataattaaagaaaatatctcgatggatgggccaaggcatggccctttctcataatccttcggtctgtttttacctaagacgtcatcacgcactgatcagtgccattgtgccaatactgtttagaactatattggctatggcttcacacaagaagcttaagttttatgctaaatttgagatgtttaataataatttaaaactttaaataaggtctagttagcagtgttggctcagagcctcagctcttgattttagacgctgaactataaatagaatcacgagaggaatatgtaaaaactttaaccaaactatatttcactaaactacgagtaaactgttcaaatttttgagacgttgctgtcttgccatgacaaaatgttgccaggctcatctctggttataataataaaaaatcttttcatggactatatagttctatttattccggaccacaaaatgaatgagaaataatatttgtacattttttttatatataacctataaacacgtgattccaaaaactattgtaacatatagcaatgttgaaatttaaaacataaataaattacacggatcctcctgaactttatcttcaatacactcgattgatatcccaccgttttttaatcctatagtaaattaacctcttaattttgagatttcgtcccaccaggtctctcttaagcgttttgttataccaatccctcttctagatataaaaaatattgttatatgatcttcctttaggggattcaaaataatgtaaaaacttgtgcgccacactgcaagctcacaaacagttcattttatcgtcttcttgttgaatttagcattcttatcaaacaaaagaagatcaagaaaaatatatacaagaacaaaaagagaacaattgacgcggaaggtactgaccagatagcttttgtttttgacacacttggcacacatagctgtttgttgcatgcattatattttgcgcgaaaaatgtcgttttaggtttaaccacaaagtgcagacattgcacaaatcgaggaagtgcgtctttcatgtatcggcttgcttttcattattttaatttttgggttgccaagtttgtttatgttcacttctgtattcttcctccaaaccaaacatgtgcacactattgctatgtgtcggcaggtttgatgactacaatctgttgttctctatgatcactttagaatttgttcaaactccttgttttaatttttttattccagcctagatgatgacaagtactgggtatgaattatcaatccagtaaagtatgggacgatatctgttgagaaagcacaaaatctagtatttaattcttattccaatatgaaaaatattttcagcacttaaaattgtactcttatgtttcttaactatttttttccagacatatattacatcgctgccaaatacgaagttcatactctaggaaacatttgaatatttttcatgtgatttatagtttttatttatttatttagcagaaatttaaacacgcaactaagatgacacagctaattgttgatcaaagtgatcaggtaattatttttttctcaaatgaagtattcaatttgtgttaagtgaatgaaaggaataaacattaaaagagttttttttaaaaaaaatgaaaataataacagtaattaacaaactatttttttggaatgtgtaaagtgttactattaccatgtgatactcaataaataaataaaaacatgtgatactattgattcattatagtttcttgttatcatgttataaatgcaaaatgaaaagtctatagataaaaatttatcaatatttatctacaaaacttaattaacttaattgatgtaaaatatttttttaaagtatatttttatatttataagacttaaactcacaagaaatttttagtctagtttcacttgccaagattttttttacgttgttgttgtgaatagtcgtctataagttatttttaaaaaggtttggctagaacaatagtaagaaattaatttggtaattacctcagaaaaaacttgtgtttgtaagaaaaatagggaaatgttaatcttctaacatgttatttataatatattctttattattgtatgaaaattagttaatatgcatattatctgataagatatatattaatttcgttaaataataagaaaaaactttagaaaacatgtcaaaaaatatattactataatttcttgataagggtacacgggaacacatttttaattatttcagtatatagcttttaaatacagattttttttatataaataatgaaagttttttttacaaagtatcctttcagtttaagaagagactggtgactaatgtctctaatgattattttggaatattattatgtatcaaagctagtattcttttaattaatgatttttgatacacataatttttgaaataaaattaaataacgctgtatatttaagatattgttacctcccctacccccaacattttatcgtgcaaacgttcatgcattaaataaatcacttctcttagtcagtactcatgattaacatatagcccactaattcaaagccagattattagccaagccagacgaagcatacttggctcggatgctatttagcagcagcgccaataataaaaagatgggcagatagggacgtaagtgaaatttaatggtgataacgaaattattattttccaatatagcttcattagtgccttctctctcttatataaataagtatattcttgcatttgcattgcttttcaacgccatgtccccaccccgatataagacacgtaccaaactccaaaattttaaaaaagttggaaatggggtcgctataacataaaaaaaaagtattaccctggtaattaaaaatctgccgaaagaaacaaaagaaaaatgggaagtctttttcatgcatgagttgtgtagaaaaatacttggattgcctgaagttcaaattacaagttgtcaggacttaatcataaaaggagaatccaaccaaaaaaatagtttattaggtaagaaaatctcaaatcttaagtatcatattaagtaatatattttatatttattgttttaacatgagacttttaacattatcattcctttaagagatgatgtttatggtgacttttattttatcaacattaatattaatatggtggtagttatttggttttgacgactttactcatctattagtattcaatttgtaccttaatttagtctataagcaatcttttacatgatccaactcataatgaaaaaatcaatttttagaatttaaacataaaaggagagtctaattcaaaatattaatccattaagtagaagagtccaaagacttaaatatcatgtagtgtattcgaatttgagatccttaacacaagtgtaattaaatagagaaaatatataaaagcccagtattttctttcttttcccttacactttctgttaaaatgcaagcaactaaaatttaaataatatttgttacatattatgcatattaaaaaaatttatatttttaatatatatatatataacattttttaatatacatacataatatataattgttatatactatgtcttatacatctgcaatatttttttgtatgtaattattgagtaaattcgtaacgtatcattaatatggtcatttttatttcttcttattatttgctgtatttttatatttttttaatcatgttataagtttaaaatatttacgcaattttaaaaaatgaaaatacaatatatatatatatatatatatatatatatcataaatacaacaagccaacaacatactaatttactaacgatgaacttaattaaaaaccattgttaccaaccagaacaataaaataacaaaaaaaagggaaatataatttttttttaaatattaacacaggttgacttaactcatccaagttaactcacctcaaattatagatcaagtgaagctatccaagtttacttaaacaaataaattgagtttctcacataaattaaaattaatttaagtactttaagttttatagaaactctcactaacctcttaaaaacttgaaatgataaattgatattagtgtatgataaaagttcaatttattttattttattttttttctcaatttttgtgaactctgtagattgactaacaggttcccttttctcttttctatcaatatttttcaactatgtaaacgagtctcgcaactagttatgggaaaatctgactctcatcagtaataattatgtgttaattttattttttttgggtgattttaactttgtttccattttctatattttgatttaaaaataacaaataaagaggatggaaaataagttaattttctatcacaataggtgtagatcaaggtttgactcttagtttgtatctttttgccttagtgatagatgaactaacaaaagatatttaagaggaagtgtcgtggtatatattttttacagatgatattgtgctcactaacgagatcaaagattgtgttaataggaaactagaattatgaaaaaacactttgaagcgaaagaaagaccgagtatatgaagtttgaattttcacgtaacagatgtaatcaagatatcgtacatctaattggtcaaggggtacccaaaaaagatgttttaagacatctgagatcaattttgcaaaaaagtgaagagattgagtaagatgtaaatcatagaatcagagtatggtagataaaatgacggaatgcatctaggttattgtgtgacttcaaaatttctcttaagctaaaaagaaagttctatagaacaactgtacaatgttatatgaagctgaatgttgacgaaaacataagcaatatgatcataaaataggggtagcagaaattaagatattaaggtggatgtgtaatcatacgaagatggataagataggaaataaagatatttgatgaattgtaacaatagtaccgatgagtgaaaaaatgagggaacatagattaaggtggtttagacacgtaatgagacgatccatatagtgggatgtagattggcggacagtgtgtcttaggacgaaatgaagaaaaactataaatttgaatgagggttagacccgttgttatctcgatgttgcatatgatccctttttagttgttttcttcttcatctccccctcttttttccccctcatttgcttttatcttcttttcttttcttttatcttagttcccatttttcttttttaacatcttcatatttatcattaggttcatctatcaccaatttcaattaacttggattaaaattgtgtttatttttatattttgatttgatttgaggtaatttgatatgttctgaaataattactacgtgatatttttatagttcttattcttttgcaggttttagagaacctgaaattatgaacaactatagcgtttagattgacattgatattcttgatttacttaaacacctattctaacaaaaagaggtgcttttgtatatttcttttaaccatatgaaagtattcatgatagtttatcaagatgaaacaatgaattgcgtagcttttgctcatggatatgggtatgttttgccaaaatttataagtcattttgggctaagttttaattgttagattagtttcatgggatgaattgaattaagtaaatagtatttgagaaaataaaaaataataaaatgcaaaatatattattgtctttcttttgcataatgtcaaagaaaaatagataaagtggtaattataaaaatagtttctcaaaatttgattactttattttttggtttatatttaattcaattataaagtagtaactataaaaatagtttctcaaataattattaatgtgtaaataattttaatttttccaactcagggactgaattacgattatgattgcagtggctattttggttaccaaacatagaagagattaaagaccttttgctaacgacataataataacgttaattttgtaaaattattattctattttattcatttattaatttttttagtatatataacacaatctaaaacgataattataatgaaattgaagaagtattacctttgtttactattgagtgagattgttaacaccttcatcatcgatggttaatgcaactgttgctattattgttaactacttgaaatacagaaatttcaaatttgtttcaagagtgagaaggaatggagaatgacttttggaccttttgttaaaatttgatattaattttaaaattaaaactaattttccattatacctttaaatttttaaattttgattgaaatactacaaatttagattaaaagaaaaacaattcttatcaattttcaacatcaattgaaggagaggtgttacggatgtttggaatgggccaagtcataagagattcaacaagacttagactattctgtcaaatagttctagtaatgagaatgtggcaataatcgtccaaagccatgatcaccaactttttgggattctcggtatgcttcgcgggcagggccgttcctgaaaattctttggtccaaggcgaagtaaaaaaatgggctcctaacacacaaaattttttaaataaaaataatattaaaactaagatatggaaaaaatgaatccttaacacacaaattttttgaaatacaaataatattaaaactaaggaatggaaaaaatggacctcacccacaaaaaatgggtctttaatacataaattttttgaaatacaaataatattaaaactaagggatggaaaaaatgggcccctgacacataaaatttttgaaatacaaataataataaaactaagagatggaaaaaatgagcctctaatacacaaattttttgaaatacaaataatattaaaactaagagatggaaaaaattgacccctaacacataaaatgaattcttaacatagattttgtttttattttttttttcaaaataaattttacttaaactacctgtacaaaagaatttgggctctgggcgaacgccctgctcgccttgccccagggccagccctgttcgcgggtaatctcttctaactgatttccacgtgaatgattataaatatgagcacttccaatggagtaaggtacatacattctgactttcttttccttacacacagtacacacatctcacgtccaattgtggtgtttcctcttgtgagcattgtaatctttttcccttaggtattttactaccattgacgtcctcagagaaagagaaagtttgatcatatatcaatcgtccaacattattgttggatatctgttcgtagcggacaaaacaagagggatattcgaggtagatttaggaacctcgtgtcatttacgagccaaactccattggaatactttgcaatacttgtaaggactttgctgttcaaatgtgtagaatttaaatatgtgtcgctctttaggtctgttaggctttctgacagagctccttatgggtcaaggtaatatttcttcttgcgtgatgatgtatgagagtgcctctaagatgaaaccctttaattacaatgtatatatgttgttaatgcattgtgttttatgtcatactttacgtctacataaactttgatggagtatacaagaagattctcaagttatgagggacattcaggccaaccaagcataaggctagataaattctaactaaaattgcaataataacacaatctaactgctcagatttcacttatatatttagttgattctttaattaggtccaaagtataaaccttaattgttaacaataataattataaaaaaaagctaccatctttccctttgatattttttcctaatgtagagtcacttatgcaattgtttccatcaatatacttggttaactacttaattttctgcaatgagccaataactgagacatcttacattccaaatggccacatcaaggaaatttgtcattttttttaagaaaataaaaaataaaagtattttttataaattaaaatttgcttgtgaaaaattaaaatatttttttcagagaaaataaatgattttaacttcttcaaaaagttgattttaacttctttttttaggatcaagactttaacttagatgttggttttagtttatgagagaagtttattttattttatttttaattttcttctcttataaacggttgtggagaaactaatctaaacaggaacttaactataattatttttaacatacctgtcagtcctcaatttttagctaattactccatttaactaaatattttttctgtattaacaactacaacatacactaaaaaaaccttccatggtgcgtaaagagacagaaagctatcctctccctacctcttggcttgagttcctttctggatgtttcatattccctctcatttttattttttattatttttcatcgttgttgttagatccccaataactttgttgacgagattaatctgtcttcttagatgaaacttaacctacagttaagaattattaattttgtcatagtataatattcggccgttgcgccgattttatgactagttcgtgttagcatttgatctagaagtttgcacagataatggacattaaaatgtacatccataaccactactgggcccagaaagaaaaggatagataaagaaatattatagctgagcggtagtcttactcaatagccatgaccaacctctaactagacacatcatcttacatcaaagcctaataatattaatattaccgcataatactataaggactaattttaagtacttaaaataattttattatgtcagctaaaaaattataattttattatcattttttttataataagcatttttaataaaaataatttaaactacttaaaatcagtataaaatgctgttattgattaataaaattatttttattatgtaagcagaaacgtaaggatatggaagatttgatggtgcttaacatatttcaagttttcaaatttcaactaaaaataacatatattttacagtcatattaccttcaaaatcaatcataaactaagacgtagccgtaccttgttgcaaatgatattctaattaatcttgcctgtatttgttgggcagtctgaacgtctttcctatacaatgtttcaatttcaactatgtttattttgtcatttttttcttctttttgggtgggttttatttaagatgtatgaatagatactcgtcgaattttaagaatgtgaataagctgctgtaaaaagaataatgtgaataagctcgaattgattattattaaaaaattcaacaaactaagtacacaaaaaatgtgcgttatagaataaattccttttatattaaatttttacatgactcagtcattagtaattttttttacattttttttcataaaatttactatattaataagaagagatacgttttaattagtgctttaaggatacagatcttaataaattaatgaatatacatttattagtaatcatggttggattgtattgaaaagtatgatggaatgtgttgataattttttttcattttttatttttatttttcaatcagaatttcaaagttaccgagagtgaggaccaaggaatgaggatgaaataaataaaaaattaggatatatgtatttatatatatatatatatatatatatatatatgaaaataatacatggaattttaaatcttttattaaccgagtaacatataactagtttgactaacattagacttgaattttttaagtgttgcctcgagtttgaatcttaaaaaaaatatagttataaaaaaattcttattaatcaattagattctaaataaatattaattattacaaaattagtagatatattacattaatgctagctattttaaataattaaatctttggttactagataacattgtatcaataaatgtcaagtgacctgaatataatgcacacgagtaagtgtgcttataacataggtcattaattattttaatcacaaaaatatcaataataaatagtgcttacgaccattggtgtaaacacaaaattataagcatctgaacaatttagaaaatcacatacaataagaatattgatatcatacgttgaagatgtttataaatctataaccttatccaatgtgaaattcatgatggtcaaggaaactacaataaaagtaagtatgtatattcattaaaaaataattgatgttcttgattcttaacaaaaacgaccataggcatccaattaaggattttgctgggcgatcctacaaatttttattagaaataagaatgaatcaaataaaagtaaaagaaatatgttaatacacaatgataaattaataatttaactccgtcactgatatagttactttaatactcatgctcgcttcgtttataaccttggtaaaaaaaattcacctgctttatttgcagatatatgcgttttttttttttttttcatcctagtctctaactctgtcgaacagacatccagaggttcccactcttgtcatcatgcatgaaattctttcttgttcttcttttttcgctgattgtcatcatctaattcatgattgagcaacaactcttgtataaaaaagctgcagaggtcgtgagtatgaaaattgtgcacccacggaaagagctttttggcagtcattttcttatccgttaatgttcaactcccaacacacctatgttcctagttagcttcacatcattaagtaattaaataatacatcaccaactgcttccgttgagcgtgtggccacagtatatgaacacacaagagaaatgttttatatgggtaaaaaattatcatttattaagaatttagtattaaattaatgttattgacataatttttacaatgaaagataaagtatcaatgtaaacattatattttctttttataaatagcataatatattatagcatggtgtattaatgtgctctttctgtatgtatttttcgcactccttgaatctactataaatataattttctatttacggataaaaaactaacaaataatttttttgatatagaatattaatataatacatgttgttagtactgactttcaaagttcatcttaataattttgtttttattaaacaaaaattatactaataaatacaattctatcacttaatcaattttatcttttaatggacacttaaaagacatttttatttcctataatttggatattttgtttttttttagaaaaaataatatatataataacaatactgtaaagtttttttacactatcattttatcataaaatattatttatggtaagtttgtttaatactatatatgatcttgtatataagaaataaaagtggttaaattgtttaattttaattaataatataaaaaaatttgaattttttcaaaactagccatattattaaatagtttaagtgatgattatatttcaaaagataaatttttcaccaatgagtttgtcttgttttgttaataacttaataaatgtgtctagtttcatgtgatatgagtctctataattaataaatttcacaattattaagagtaaaaaaaaagttaacaattaatacacttaaaatggtcacatatcagtttcttataattaggataattttttcttcttcttttgtttcttatttaaatgtaaatcaactaacatgagattgtttgagcttaatcagaaatcttagattcaagtctgaatatatagttgtgtgatatatttggagggagagttttgttaaccataataatttttttgactcgaataaaattatttctaattgatgatacttgtaacttaaacaaaacacagaaataggtcattttcatcctaaaaatcttactaaagcttatttttaattgtttgacaatataagttttttttactgatggtgtatatttattaaactccttttcttttaatcctcatcattagataaacttcattaaaagattacgtgataaataaagtataacctcatcgcatcagtccaattttacatagtgatatgtattcaaattatagagactaaaataaccattgtccctatatagatcaatgattaaaaaaaaatggaagaatgggatgagagattgggtaatcacctaatttaaaatatgggacatatgatagtttagtaatagaacgagacaattgccctagttttgatatgatcaaattgggaaacacaaaggagttgaaatgtaagatattatccccaatcaagatttaagggaataggattgaataataataataataataataataataataataataataataataataatagtaaaaaggaataggattggaaggttaaacaaatatggaatgacattgaagatttgaagtaattgtcagattcctaataaattaatattatgtattctgaaacaaattgctactacaatcttaccatttcacatgccatcacatgtttcatgtttctcgtatgttacgatgaagatagaacattgaaaatattatattatttggatgaaaaatattgatgcataaacatggctggcatggaagtagattataaccgtgaagagaatagtaatatatagaagctaaatcgaacattccacaaaagtttttagagggaataacaaattgaaggtctagaaaaaccgatgttagtttttcatgtttacaaatttgagaaccgcacgtgtcaaggtatttagttaccccaaatttcacattttcacttgcatattcttatcttgagagaatctattaagagggtgaaacaagaatagaataacatgttaattgtctaatttagttttgaaataataagatgaagggtaaagcaaaggtaaaagaacattagggagatgtaaaaaaaaccagtttctcccctgtacttaaagttttgctagataatatgagtaactagattaaattaatttaaacatatattttaattattgaaaatgaatcaagtttttggagtgcttggctaatcccatattttctacttcaacttttttgcttttgaaaaaaaatgaaaaatgaaagaaaacaaaaatctgagtctttagagatgccaagtttattaggtagatgagctgtcagcaatcgtggcgtacaaagaaggaacactgtacacattctcgtcgtccagcttccagctttggtgcaatttttaagtgacggtgacccctttgaaatggacatgtttgatgcagcacgggagtgggacccacatcacatggctctaccaacacaggaaccaaagctaggggcgccatgggacccacttccatgtaggggaccactctcatttccttttttttaaaaatattttctttgttttcctcgggggtaccgcatttcttttctctatctggcccaatttatccctcctaactccgaattattagaaattataacacaaccattccaatgggtattgggaaatcaaggatcagcaaggcttccaatggaatctgctcgtgttttccacagtctgatagaaaaaagaatgcatccacatactaatataatatctatgtcattacgataaactacaaatttaaagtcaccagacaaaaaaatagcgtcccatccctccaacttggactgggaccctttccgaattgctgtttggaatttctcaaaggccaaggaaaacaaaacagtgtttccccgtatcaccgcatcactctttattggtttcctcgggaattatatattaacacatgatggtatatagctaaggaaaaaaaatgaacaaactgcattacccgctatttctactgtttgatttttttatttttcacatgttttcttttttagaaacagttttgtttgaggtacgtttctactagatctaattcccgatggttgttccagttttggtttggtttttggtggaggctagggtccgaaaaagtaaatacatctatagtcgttagatcaatattgtgggatttattgagtaactattacaatgttttacttattaatattttaactttttctaatacgcatgaaagcgacatctgagaaaataataaatttattcatagaaataaataataatatactgtaaattaaaataaattaagagaaaatatgttatcatctgtctaccaaaataattatgcatagtatgcatatttaatatgtttctattgttaaataaatttgtgaaacatttattaaataatgtgatttttaataataacttttatgaattaaaattaatgaaaaaattatattaaaaatgtgttaagaattttttacacgaaatgttaaggtttatgctaaaaatatattattaatacgtattttttattttaatatcaaactaaaatgactaaaataatattttcaattataatacataattaaatttaaaaaaattttaacgttaatattagcaagcatcttttcacaaagtttgctaggaataattgatactagtatttttataaaataactttttttaccaacttataaaaatgaattataagacacaactaaacataatttgttttattaacggtaatattagcaaacatcttttcactaaagttaaactcttaggaataattaatagtattttttataaaataattatgcatataaaaatgaatttatatttttatataaaaatatattatttaatttaacatgaggtttcctaaaacaaacatgaggagttagttttattttttttctaaatatgtcaataggggtggaaatgggttagaggaccttcgaccttgcctatataaggtctgatttagcctgacttatttattataaatgacagactaaggtttttttgaaaagcttatttaaataaaaaggtcagactcaagtttaaaaaaaaaaacttattagacctatcaggctagcctatttaatatatatatatatatattaaaacttaaaaacaatatatttatttttctaaaaatattttttcttattaacaatcatatagtgtatgatgaatgacataaagtatataatatatatatactagtgaagatgaatggcgagtgtgagaatgagtaaaataggtttattgattttgacaagcttatgcacataagaattatgtctacttcatagaatgactctaccagtaacactcaaatccctatcaaatcaagtgtaccacaagtcagctccattagtttggacatttaccatggagtagttaaacttgtaggaccacgttttgggcttcagttcgaggcaggtgttgtcggtgagcatcagtattacattaattttttttttaattattttttatttcatcaggctttgtatacaggctttcaggtcaggctagacttttatgcatgttaggctcaagcctgtcaaagcctagcctatttccatcactatctgtcaacataaaatcttttaaaaaattgatttaattaatcaaatcgtaattgaatattttgttggttcactatgtcgacagatatttcacagtatggggggtgttgtggtagttccctagtgggcctcaaggagattacgaaagaaatggcactgtcatgatgataaatcatgaatcaatggtgcatgtggtttacctaggagtgttaccatgtatagatcacttgcaaatctaaattggtctaaatcgattcggatagtttgcgttgagtcatttatgcatttagatcaaaatcgaatcgaactgatcaaaactgttcatgtacgatttgggtcacaggtttagatttatagatctgatcgaaatcaaattaaatcgatcaaaaatgataaaaaaaattagagttgtttggttttgttaaatactgttaatattaggctccaagtgttgaaattgcaaatgtttataatattaatggatcatattttgttcatttgtttcagcaaatatggttataacaaatctgatttcatcaatgttttatagtaagaaattaatttgtaggaaatagttgtgattcagattattatagataatgtcgttaaaagatatttgttttaatttgttttagtctattttagaatattatgttaatggtattaaatgaatcaaatttactaatttcagacatttgataatattatgttagtgtaaatagtcattttcatctctgaatgtgtagaacactgataaattcgtcctcaaaagttagaaattcaaattgtagtcctcgaaagtgaaaaaagtgcgacaaaccagtgttaggcttatttaattatattggatatttggatgaatcatgatataaaatagtaattctaaaacaaaaaatatcaaatttaaatgggtaacccgttggcctgaattgaaccgaactattcatgaatgggttgggttaagttgggtttttacaaaaatttctaaaaatcaaatcaaaccaaatttaaattttattgaattgaatcataaatttgacgaaaatcaatccgaaccgacccacagacatccttaatttcacccttggtgtgtagtttagtgtgtggcttaaacttaataatgcaaggtcatattatccttcttttgaacaagttgtaaattaaaaatgaaagttagtttcgatttatctttagttttgaaatgttattatgtacgagtattttattttattttttacaaaaatgttactatgtaatgttaatataagtagtattatactagtataatacaatatttcgatttcctaagacaaaaaataagttaatcaactcaactataaataattaaatacctttatttaataggtgtagttaaatcgaaaccacacattgaatttgtgtaagccaaaatgtgttgtgtttttatataatatattcttgaaaaagtgtaaaaaaattcaaatataattaaatttcagataaaaattagtattataactaatcaaaatgactgaaatttatataaatatttaataggtgtagttaaattgaaatcacacattgaaattgtgtaagccaaaatgtgttgtgtttttatataatatattattgaaaaagtgtaaaaaatttaaatataattaaatttcagataaaaattagtattataactaatcaaaatgactgaaatttataaaaatatgttaacgtttaacatgaaaataaaatggcctaattactttgtggttgttgaaaaaatataacataatatatttatgttgtccattgaacaattttcttatacatttatttgtaaaaagttgttttttcatctagaaataaattaataactattaaaataacaatataaacttattattcacaaggacgggtgtgttacgataacgtaattaaatcagttttatattctaggacataacatattttcttttaatttattttaatttacagtatattattatttatttctatgaataaatttattgtcctctcagatttttacgcttatgtgattcataaatgacacgttgtgttgcatatgacttttgttagcagatgtcgctttcacgcgtattagaaaaagttaaaatattaataagtaaaataatgtagcactgatcgattaccaattactcaataaatcccataatattgatccgacggctatggatatatttcgtaacttaggcaaaagttactctttcgtactcctagcctccaccggttttgaatggggaaaagattattggtacctatggtttcagaaagtacttaattaaatgtatttgtcaaataaggtgccatgactacacgcagtcgtgttcatgatgggggaccgtttggacagagtggtggaccagcctcatcaccgtacacgtgtacaatgaatgggtttgaagaagaaatagaacacgtactcgtacgcacgatcacaaaagttaagcacagaatatcagagagagaagatggtgccatgtgcgaccctgcaatgcaagcgggtttatcaagtgtgccgatccctatttctccatccgtacaccccacaataaaaatgttgttttgttttcttgttttgccttgagaaaatataataatataaaaaagaaaggggatttgcattttcaggaagcaaacacaggctacgtgtcgtgcatcatcttattggctgttcgtggggttgctttctcttactttatttttttcataatcataatattattttaagaattcttcttcttttaaataaggagtgcattgaccccgatgcgtatgctttgatcctacttgatagaaaatcgaaaaatactgtgtgttgggggattttttatttttattttcagcttttaaccttttaacacaaaagtgaaggatgtttaatttacgaagccgatccaatcatacggcacagctttttagggacgttctctttaatcatattttgcctttttcttttttagcatcaaatttgattaaagtggtagtataggtcgtaaaggaaacacaaacatacctactagtactactggctcccaaaatctcatgcacgactcttagatgccaaattggacaacatttcgattaataataaagtagttcaaatccttctctatcgaagtaatccttaaatttataatattgatttattgattactacagttcatacaattataaaaaaaaactgtcactttaaagttttgaaatatctaatataatattcataggtgatgaccattttggtctttaaagatttatattaaattaatcaatattttaaatatttaacaaatattttttttaataatcgagattgcaactacattgtctcaagtttgaaaatgttaaagtgggatgaactcaatagatcaacccaagtaacccataaaatacgttgggttgaatgattcaatgtatataatttaactcacataacctatcaatctaatgagttaaggaacttattggattgagttagattgatttgctggactcatacttttttggttagatttttttatagactgtttagttaaacatttaatttattggataaaaaaattatatgaagtgttgtaaatttcatgttattttgttactttactttacatttatttaacttaggatgatagtttccaaaaagatttgtgttaagataaacttgtaaagtttttatgattgtaatattatgtttatatttatttatttatgtgataaatcaacttagttattcattttaatgagttaaaaggtaaattaaattaggttgagttgggttagattgacccatttgatatcctatatcaagctaatcagcaccagccaaggcaatctaattcatattgtgttgtatgtgtttacctatttggttgcattgatacattatacttatgtataccacaattgaatgatccaatatttccggacacgtattataatctgtatgtttgtggttgtttgcatgctaagggtttggtgacgtttaattgatagcatgaacatggatcatcggatttccgagctcctttcccaagagaggctaaccaagtactgaccgagagggtcgacatgatgcaagtataaataaaactaaaacatattaatgtaggaatttcggtcaaatgaaaaattaattaaatattaaatattcttttattaaagttcacaagaataaaatagaacataagaaaattattataaaaagggtaagaataatgcataatagaaatttatatttttttattttctatttaagatcaatgtatataataaagtatatttagtttataataattaataagatattaattggaatttttgtttgccttgaaaaataatgattgaaaataaaaattaaaagattaaaaataaaaaatgaataaaaggagtgaattttaaaaaaatgaaataatagtctaataaatataatgagacagttgtaatggaagtttcacattataagtagatagaacaaaattggctaattataagctctgcaaattaaggatacacttgaaaaattatttattccaagaatcttgtttataaaattaaaaaactatctctgtataacttaatgaaaaacctcaaacaagttttttgaattttcgtttttatatttcatattttctcttgattttgaaaaaaaaaattaaatcttgccgctttcctttaaaaactctttaatatattaatattttcgtttttcatatatagttattctaataaaaaaacttgtttgtagtgaaaactggttggataagagggataacacatagtagttgatgctagagctacctacagatgcttatggaacttagtttatcctttgtagtgttgctgataaagatagtgtgggtggggagcaaaaaacgtcaccaaggctttcatctagtagtgttggtgaaggtgacggaatattcttcgcttcataattttcatcagcatctaaattctcttccgctagctttgtttgtgcatgagatgtgaagttcatcaattataaaaggtttggtgaattttaaggtgagggatgaaataaatactttcttattcacgtgacttaaaaacaatagttagatatattattaaattactgacataattgaatcattctcgtatgtattatagccgtttataaaattaacttgatgggttagaattatgagaggtttaagagttaaaaggagagagatgaaatttgaatttaaattcttccatattttaacaaaaactaataattaatattaaccaataaaaaattatttttaataatatatttaacgaatatttatggtccctcataagtgacagacttttttattcttcaccttagaattcacatttgtcaactttatttcaaacttcaaaggtattttaaatttttaaaaataatttaaaaaatagataaaacccagacagatgattattccctttaacaaagtttggtcaagtgttctatctcggttaattggataggatgtataaattattataaatatcatcctcaattcttatataagaaaaaaataaacaattgatattaaaacttaattttaacaattggtataatttgatactctttcgtgtgtgtaatttaaattttataaaaaaaaaactaaaagttttaatgtaaatattattttttgtaaaagtcaaacttttttttttaatattttgtaaacattagccttataaaatcagtattttatttatttattaattttccatgcttatgtgatgtacatatttagtgaattgcacttttaatctcactacaatttttaatgttcgattgtagtcccttttgataactaattttaaaacactttattattaattttaagactttagataataaaatgaaatgcaaacacccctattattagttctgaaatttcatttgaaaatcttttgatagtaaagtttaaaaagtgaatgttgaccatatcaataatcgtagcaagagagagaaaaaaaacttcagaatttcgcttacacaaaatatatatatatatatatatatatatatatatatatatatgattttttagctacctgttaattttaatttaatattaattttacactacaaattaaattattttattataaatccaaaatataattgataaattgctaaaaacacaattaaacctatcaataataagttattatacttttgggatagttggttattatattgttatagcaggtgatccaagtcgtagaatcactagaagcatggtaaaaaaacttgtttaatgtcttctaaaaagtgttagcagtagcaaagtggttctaagcaaattaaatattaatatattaaagaaagcattaagaaggaaataatttattactaataaagctttcatgagtaaacctgaatatagaaaaaaatttaagaagaaaatcctttaacatcattagccaattttcatatatgtaatacacgcacacaatattatttacttttacttattatttttatatagaaaaatattacaattgtcatcgcgactgaaccaatgaaccattatggaaaaaaagtttttttacaaatatttaacatagttccatatcaaacaatcaataatatttattttattagatatattttttgtttttaaattttcatcatataacatttgaaaattttaaactctttttatttaattcaattgttacgattaccagcataaaaacacgcaaaattttactttcatctacacctataatttacctgtgcgtccaataatgaccctgttacgacacaacaaatatatttagatatatagtttacctaatgattcatgccaataaatacttgaagtcaaatgaaatggttcaatatatatatatatatttacatttaatgaaaaattgaaatttttaaacttttttttattagattcaattgttattataatcatcataataacattaattaatttatttattgaaaattaattgtgtaattctttattattaacggagcgtagcggagcgcgacccgtgcatccgcacgggtcctagttagataataaaatgaaatgcaaacacccctattattagttctgaaatttcatttgaaaatcttttgatagtaaagtttaaaaagtgaatgttgaccatatcaataatcgtagcaagagagagaaaaaaaacttcagaatttcgcttacacaatatatatatatatatatatatatatatatatatgattttttagctacctgttaattttaatttaatattaattttacactacaaattaaattattttattataaatccaaaatataattgataaattgctaaaaacacaattatacctttttttgtacaaaaatatagagagccacaaagtgtctcttttactaatttattataattattataaatatcaaacttgtgtattatacatgctaaaataataattaagcacaaatcattgtttttttctacataataattatttacctagaaggacaaagtcaagtgttaaagtgaaaacttatcattctttttattttatcattgagacttttctaaaggtaaaagttatactttaaaggattaaaaaatactagtaacatgttatttaacatatactttttaaattcacagttaaaatttattaaaaactataaaagtgtgtgggtctcactctttatttatctattttcacttatgattttgtagctttcaaaataataaaaaattaaaaaataagcgtaattaaaaagtgtgttattactaccccttaaatatagtatatttttaaagatcaacaactaaaaattgtgataaaatataaattaatgtacaataaactttaaactattataaatttaaccaccttaatgttataattatacttaatcttttccctctttttctatacaaatgaaataaaaataaatgctaatggaagtattagatttttacttttttttttcaagttaaaaaaattgaaggagtgaagttatttttttatttaccattcttcaacaggattgaaatacgaaaaattatctttttcttttttcatttttatttttgaataaaatcaaataaattttatttattaaattattattttggtctctctctcgttcttgatctgcatctttgttatctttatttgttatgctatttttttccaaaatttttgtcccgcattttagaaaatatgctatttttgtccaattgttaattttgcatatgttttttttagtccaatcaaatcctaacaaatttatttaatatattataaagaaataatttaattgattaaaatgtacaaaataaaagaaaaaatgaatgcaaaattgatgattagatcgaaattgtaaaatttgtaaaatataggaacttaaatcatgaaaaatataggaggataaaaatcacaaatcaaaattataatttagcccatatttttttaaactagcaattttatgttggaaagtacttgggtaaaatatcatgttttaattagtacaaaaatattttcatccttatttttttcactattttttccactcataaacaaacaataaacaaaattgttcactccattattggtttaattatttttttgtccttatagttgtggtaactttcactttccttccagtctttatagtttagagcatcctattttggttccaaaagttgcatttctttactcatttgattatcgttatcaagtatcgattaaagtcattttaaacgaatataacatgacccatttaattcacattcatcgcaaataaaattaaacaactttagattacaaggatcaaaatagtaaaaaacatgatgactattgagttcaatatgagatgtttttaactataaaactaaaaaaaatgttataaatatagataccaaaaaagtaatatttaaatattcattctttctttatctgaattttttctattttttgaacatttacaacggattttttactattgagggacaatttttttgagaaattacccattgggggtactttttgaaaaattatccaatcagggataagtcatgattgccatacacaactctctggttaaagtcgaacatgttcttgcgaattctgaaatgttttttttttttttttttttttcatgtagaagtagtaaatataggtacaactcttatttattttttgaagtcatttaaaagattgtgactttagttatttttaagtcgttaatataggtacaactcatttattttttgaaatcgtttaaaagactatggctttttgaagaattatccgattaggaataaatcatgattgtcatgcacgactttctcattaaaattgaacacattcttatgacttctaaaatgcttttattttttatatttttccatgttgaagtcatatatataagtacaactcttatttatgttttgaagttgtttaaaaggttattttcttagttatttttatttttatgtcataaatagaggtaagacttttaaagtaattattattcatttatttttatcgaagagttgtttgtttcatttcgtttttttaatattttgttttaaagttttctttataatactatttttaatttattaaaaaagtgatgaattattttttaatttctaatataatcatttattatttgtatttttttagttctttatttttttattgttttcaaatattttagttaccatgattatgaccttctgttttacacaaataataattaataatatttgaaataaaaaataattcactacttttaatataaattaaaaatagtattataaagaaaattttaaaacaaaatatttttcttaaatgaaatgaaacaaacaactataaagtagaaataaatgaataatgaacacacttcagaagtcatacctatatttatgggaaaaaaaactaaagttataatcttttgaacgactttatgaaaataaaggagagtggtacctatatttattacttctacacaaaaaaaggaaaacaaaaacatttcagaagtagtaagaatgtgcttgactttaatcacaaagtcgtgagagactctcacaacttactattaatcggataattttttaaaaagtaactcaaattagtaatttcttaaaaaaattgccccccaaataacaaaacagcctacatcaacctttctcgtagaagaacataatgacacaatgtgatgtttttacgatatacaggagtagaaaaaatagattagatgtgtaatttcacaaaatcttaagaatatttacgtataatttactatatatttaaaatgatttcaacaacacatttttacttttctatttttcctgtttctcagtcctataattcatttatgcccttaaagtatttagtgtacataaaacttaaagtcaagttaaataaagtcaaatcacaaatacaattctttaaatacttttaatatgccaataaaaaaaaaatctctctatagtttacaaaataagtttttgcaataaatattaatataagttatcaaaataaaattcaagttgtgattaaaaaataatatataaacagttaaccgcatgtaaataatatttaaaatgccataaatatttaattccaatatgaaaaacttagatttttgataaaagaaattaatctagatataaaaatacaaaagccgataaaactggtgagagatagaaagaaaggtggaagcagaggtgaattgtggattttttacagcattactcactagatagaacttaattacgacctaatcattattattattcataaattaccccccttttcccgcacggccgagagattgatgatgatgattactacccccgtttatttatcgtcatcaacctctcatatccgaccccacgccatgcgtgcttcagcccccctctcctttctctcaagctcttcaatttccctctcttcttcaatccttgaccatttcatttttacaaagtttctctctccatccaattactatacaccctgcaaaatgctctcaattaattaagcttcttcttcttcctcttaactccattcctctgaacagtaccactgcagagttggtgcttggtcatccgagaagaaattgcaggcctcgtcggcgctgagaaaattgtgctcctccatcttcacgtactgcgtcgacgtctggtactgtttctggaactggaaacagttgttcatcgacgaagaagaaggcgacgacaaaagccagtgactttgcagaaccccacacgacgaaatcgccgcgttgctgttggggctgtggttgttgttctcctcgttcaagatcgcgcttgagtcgctatcagaagacccatctttgaaatccacagggaatacagaaccccctcccacctcatcactcttgttgaaacactcgtaactcaactccttcgagtccgatccaggaatggcggcttcaccgagcgggttactatcctgcagagtggttatcatctcttccttcaccgaaacatcgctttcagtgttgttgtcgttctcttcttgcaccagcctcgatttcaattcctttatctgccaacaaaacaatcaaacaaactttcaatacttgttgaagatcccatatcgaccagtgatgagatcaaaatagtatatatatatatatataaatatatatatatatatacacatcttaagctaccagtgtaaaaattacctctttgagtaaggcttcgttgtcttgttggagggtgtcaaagttaagtttaagtgatccgtaattggctttgaggacaccgtaatctctttccaattgctttgttttccatctggcgcggcggttctggaaccaaaccgcaacttgtcttggttgcaagccgagttcttgcgcgagcttcacctttcggtcaggttcgagtttgttctctacttcgaagttcttctccaaggccttcacctgatccacgcttagtcgtcgtttcttctcagagtggtgccctggttcttccacgcatccttcttcgtcgagtccttccagcatggactggaactccttcccatacacgtggttgttcctcggactgtgttcgtctgttcaaatcaagacataatcatggttagtgtaactgtaactgttgttgtctcttgaaacaaaccaacacagagcataattcaacatgatgatgagttgtgatgcaatacacacacaaaaaaaaaacagaataaggaattttagtataaaaataggaaaggtttgagtaattgggatggttgatcgtgaaaaaagttgagacaagacaaggcacaaacatgaaacacgcatcatggaaacagagttaaaagccgaagtttcaattttttcaattaacctgttggtggacaaatcgtcatgagagcaccccgagtatccgaactgccaagtctcttcatgagtagtacaaacaaaagcacggatcttattagatcaaggaacttaaatttgatccctttatttttcttttagtcaatgtatattaagatctcaagaagaaaagctgagagagaagacgtttttgttttgatgtttctttttttcacttaaaaggaggcatggaacaggaattctggtgtcttaaacggcgccaatttgcacagcaactactaaacgaccactcatttccataaactcccatgtgttgttgttccttatctcttgacacctcttctccctcttcacccatcaacaaattccaacacacagaacaaaacaaagccacacaagaagtgaccaatctctttcttcctgcacactggtctctttttattctctatctacatcatcacacacagaagaagggtcgtaagggaaaagagaaagggagtgttttggaaggagcgtgagaagtaaggagaaggggaagggtgaacaagttcacaggccaggggttgatgagagtttgtgtctttaaataaaccaaggcgggttagaatctgaccggggttaggtgactgctactgcggttggttatgaaatgaacccaaatttaacccagatgcaactttttggggtaccgggttagccggttaggcttcagttttttcgaccgtttcctcgaggagcgcacagtgtggacagatgaaaatggaaacggcgtggctttcggcagcttgcgtccactatttaagccggcttaaggtttgcgttacgtcagcgtagtaataatactattatactactatcacgcgctgctctagccagtgaatcacacaagtctcctttccttacgttagcatgtattttcattcattcatttaatattttgttagattaaatatatttttagattttataaatataacaaattttgactttagacttaaaaaacaattgttatttcattttttaaaatcatcaccatcgctatgtaataattatgtaacatatatttatatattttacattttttacatttaggaatccaattcaaatatcataaatttataataatttgtggatattgataaatgaattgagttagacatatttgaaaaaaaaattctaaaataagtgttatatttggtttttaatggaattttaattgtttttttctactaatacttctaataagtgtcatttagttatttaatataatattaatactaaggttaattttatagaattattattatcttttatatacttattagtttttttatttataaaaaaaacttcttctctcttagatgtgcgacatagattaatcaaacaaacgagaatgcatttatcttcttctctcttagatctcaagcttagtaaaccactccataattcactattccacatagtaaaacagttaaataacataatttactttgctaatttttttcatgaaaagtaattaaaaggtgaataagttagcacatcgcaattgacaggcgccaatgaaaaccttcaacaaccatgcaaccctttttgtcacgaagcttaagtttaccagttgaaccgaccctcgctattttccttcatttctctaaaggtccatgttcatatgatctaaataaataaacaactcacaaatcataaggtatttgacgttttccccgtacatggcacatttattccctttgaaaaaagagtactccattggtatttatataaatttaattcaatttataaaaacgatcgttatattttaatttggagtctatttatatacattggcaattccttacaaaaatgatcataacttggcaccagacagcaccttcttcaattcaagaatctagagagtatcatgaagaacatatggcaatgggaaatcctcctgaataagaattttttacatggcaaatggaaagctagctaggcatatatggtgataaatgttgcgaaagcaaagtgcaagagatccccacactttcccctaaacatatggcagatgtggtaaattgtgtggtgtgtccagcattgtactaatgtgctcctttctacgcaatttcaggccctttcaaagcagttaccgaccagtgacaggcaagcatgaatagaatgggagaaagcgagttttggcacaaaagtatgcccatcactccttgggccctactcccatagtaaaaaacaaaaatcaaaaagaaaatatgcatactttatgtccaaaatgggacccagttttgtaaaatggtagcaacacgtgtgtggtgggccatggcatagataaccccacgggaacggaaactgttgtgacttgtgaggacttcatcgggttgaaagcgtgagaaccagctttgcgatttacaataagttttttggggttatcaagatcgcatttgacactcttttatttgttttttcattcatagaaattataaatagtgttaaaaatttataataatttataaatttcatttaattaattgagttagattttattgatattcatttgtattaaaactggagagtgaacaattcagttcaattttacctgccttaattttgacttcatttttttaccttcaatttacattgtgggtgagtttagatccttaaattttttaatattttgctttgatgtaggtatataacaagttaacaacttctagttgaaatgtgatccacaactcatttgtatgttaatgttcttgttcctaaaatttgatataaatttaatgaattttgaatgatttagtagaatgtcaaattaagatcagaagagcgagaaaatattatatatattttttatttagggcacctttggaattttgattaataccttttagtgaaagaaagtttaaaacaatttaataataacaatttgagaagtttttgactaaaaatgaaaatttaaaaatttaaataaaaaaataatggagagataatgtaaaaaatatttacaccgtcaatatattttaattaagtttttaaaaaatattcacagtttgagcttcttttatgaaatgttaaaataaatattgagcaggcaggccgatagtgacccaacccagcatggcagtgaattaaataacgaggtagaaacataacaaacaaaataaccgttttacaagctgatccggcccatacaatgttttcaagtttccagcattttatctcacattaaattcggggtaatattcaacaaaaatgttcgagagataattactgcaaatacttcggcctcatagacatacagacttcgaagttgaaccatgggttcatcatgtgcgagattatgaatcgttaggaatttatataaatgtaagtatttgtttgggtgagatagcaaaaaattaattttaaatgaccttaattttacaattaaactgtaaatgctaaatctaaatattaaatttgaaataaaatactttatttaaaaaataagtttataattgtttcaaacacaacctagtcttggtcaaattcagttcaataaacccaaaacacctgaaaagtctaaaactagaattcaggcaagttaagggtgaagaactgataacagataacagatattcctcattttttttcttatcacatcattagaaagacatgcaaagatgacctaatagcaagcaatatatgacctcaaccttaattgtctcttaactctacctctacccctcacggatttaagcgtccaaatcttcataaatagtattcttaagtttcaacatctaccttagagatccaattttgagacacacaaacattggctcaggcttttgtgggaggcacattatcatctatcttggatttaagctcttttaatattaattattttgaaaaatgctgacaacatttttttaacacatttaactaaaatttattataaattaaaattatgatggatctcacttctaaatcactaagaaagtgtaagaaaattaatgttactagcatttctcgattatttatcagggcaaagggctaactcagtaactcataagctactcctagttaaaccatccaaattacaattgttttttttttttttttccctaactaaatcatgttacacatgctcaaacgcgggtttgggtgtagcaatcctaatgcagaaccaaacatagccacaagaatagattgcagggagctcaaaaccttggatggggggaacagacatgtccaatttgtagacaactataggagaactttgcttccgaagcaatatgtttcgtgaacctaagatttaggcaaacacaatataagaacagagaaacagagcatttccgacaaggggcatcatttttgtgaatacaatgacatgtctatatgtcatgaatccatgtgcccagatagaacgtgaaccctatcctaagattgcgtaagaataagcctgcatggtcactgggacataattattcgtgtcgctgacttgttcaaaagcatctgggtaaggcactgtttgttttcaaacactaataatttttaatggatatctgacgaatcccacttctccagctgggtttaacttcccgatttggttgttaagcactctcctaatacaagctggaaaaaaaataaaaaaataaaaccacgattctatcatttttttatatgaaaatgttcttattatatactctgctcttgtcaacaaaacccataacgtagaggttataggtatggaactccgaactctcactttcagcaaacgaataattgtgtcgggtgacaatttagtccatttttttactaactattctattcatccatatataaatttaaccaatccgtccaattataaaaaaaataaaatagattagcaagactagatcactatatttaattggatgaatacgcataaaaataaaataaaattggatgaatgatgaatcatttaacatatttttataatacattaggttaagtaattcaaagttcattggtcgagcataggactttaagggacaaatcctagactttacaacatttagatacatgaatgtgtttaactaattttttataaataaaagacaatatactttaaacgggatggatttttatttaattgtttattcaatgagtcatgcatagattaaatttttaatacatttttcacatattagtctataaataggagttaacacatatagaactcacactatccatgacttgggttcaatgtttaaacatttttttattaaatgagtcatgcatagactacatttttaatacattttccacataatagtgtgtatgggttaacacatctagaactcacactatcaaagacttgggttcaattttcaaacttttaatgttgatagacaatatgtaaatttcattatataaaatctggttaaagttgacggtcttttctaacttcgcaagagggtgcgttttctcttaatctatttttttttcttcacaagaaaaaaatattttttacagattatgaatatattttttcttttatctagactacaacttttcttcaagagaaacaatgactctcgaactttgtaaaattattataggtaagaaacttcctcctattatatattagtataattcaatttaaaatctatccaatgcattcgtttgacgcttgatatatatatatatatatatatatatatatataaagtaatactaacaatattttccataaactagaagaagcagccaaacgtttatcacgtttcctagccaaatttcatcaaaattaaaattctgctatcaaacaatatcagacatttgatcataagtggaaaaaagtggtgtgcccaattaggtagataaaacgccatcgtgggtagaactgcaaaaagcggaacacttgcaagtagagagttctttctacaaagtcagaatctgtgatttaagatttgtttaggaagcaaaagctagttctagtctagggtgcatgattttcatttttcaacactgcatgggctgtattcacaccttgcaaaattcaaacataattgatgtccaaaatctagactcctagcaaaatctttggccgccatattagtctcaacttcttctataagacagtaaacttaggacccacacaacctttgctaatgcgtaaaaacgttgccccccgtcccttgtctgatcgtacaaacaagaacacataagacagtgtaagtttaagctgtggagagacaaaatttgaggttgcatggaggaagagggaaactttgaatttgcaacttgcaagggcatgatgatcaatgaatatgaaattttttttgggggggggggggggaaacaaagctaacaccaccttagttaactagtgaattacaccgatccaacaaatgatcaatcagccaatcacatggttttcattaaagtgattttgattagttccaatgctttagaaagtaagaaagagagaggcctttttggtttggtaagggcctaccagttactgtgcatggaatacaacaaagatacacaacgaagagaaaaacaaaggagaaattaatagatgaatccccccaccaccaaagaaaaagaaggcttgattttgattaggtgagaggctttgtcggacagcgcataacacctagtggtaagcaactttgttctcttttctaacttgtgagtgctatccaaatcaaagaaagaataagcaaaagttacgggaaagaaaacagaatcttgacgaggagggcttcctttttcataagagtgatattattattgtttttttctctctctttcttccaagacaattgaaaacaactattcataaacataagcattaatgttaagttaaagtatcgtctcaaattcactattgtgatttgttcgatttttcattgatgaaaatctggcccgtatttaccctttcgtttcccaacatttggttaataaacctttcaatttgggtcgatatgctttactatgacaaccaaatgatcacctcaaaacatttaacagctttcggataccagaaatattgtcctttgtagcttttggattgagttgagagattcttacaaagttttactctatacttccttttggaatagcttttttctaacataaatcaattcatttcaattttaattttaagcaaaatcaattttgtaaaatcaagatttataaaactaattcttgatcacatcagtagcagtcaactcattaagccttgactctgtcatcataagacaaaaaaatcattgcagaacaaaaacatacaaatggaactagtatgatgggagaaaaagtatcagttaaaaataacatcaccacataacattattaacggaatgaaaaagtcaataacttaaaataaaatgcagaagccatagcaacaacattaaaacaatattgagattcaagtgttcaagaatcagagcagttatccctttactaatacattgaactaaaaggaagaaagtttgtattgcactaattaagggttttaaagaataacatgatggatctcctaccaaccatttgtcattcgtttctgcaaagcaaaacaatgaacataaataaacgaaatgaatctgatacctatagccactatgatccatttatgaaatgcaaaatgtataattaatgaaatccgtacacaataaggcagagtaccaagacatccatttttttcccatcaaccatagtcctttccttatttggatgttatatttacatttcaagctcattccaccaatgatcattcctttgtcttggtgtttatatagactagtgaaaatgatccttaatcccattatctgttttatcctcttaacaaaattactgattatgtgaggaaaatttgtttaaatttatttgttaaaataaatatttattttaataaaaaaagcaaccttttatatttttaatatgtctatataaattacttttacttaaaatagttttatacttattttaagaagcgacttactaaaaaaatattttttaaaaaattctttttctaaatttaaacaaactaatacatccatttgaaattttgaacaagttgggtaacagtcttgtaggggaacacaaacaagacattccatatttgattatattgctaatttaggaagatgatgagcctaggtggaacaataaggtttcagccttgtgatctcatgattacgagttcttctctactcttggagataaggccgcatgcatttgatcctccacacttgaaatgtcgttttttatattgctgattcaggagacattcacattataaaacatgtaaggaaataaaaccacatactttaatccttatttcaggtctacgatgctagacaggatgctttgtttcataaaaatggcacacgccacatatgcaccaaggtcaataagccaaaaagacagaaaaatacttttggagaatatttcaggtagcatctgttgtataaccaattagtgcgtgtttggatttctggtgtaaacctaagtttgagccaacctccatttccaagaagcatccatgaccctttattttgcaaaacgaaatttgtgggccattatatttactttggaattcatgcaccacatcttgaacagacattcaaacatacctttattcttcttcctctattcaactgcttttctcattgtctaaagtatttgatttcaagaaaatgaacttaaacaaacaagagtaacagcaaagctgaaatggacttgatttcaagattaaaaaaaaaggtagtgtattttctgataatacatttctactttgtatccaagtcatatgaaatgttcagtgacagtgattgtgacattttacaataacaccaagacaaggttcataatttacatgtctagatattcatcacaacttttgatagttctcagttgtcatacctgaacactacagttgaattactttaatacaattgcccaaatgccgaaataaggcatgatcttttacaacgattatctatgtaagtttgagcttatgcagttcctaatccgaatcagcatctcattgggcatgagctcaccgagggggaaaataatcaaatattaaattatcagtgccagaaatttcaacttataaaatttacctaaagttgagaaaaaaaacaaaattatcctcatatatgaaaatgaagtaatatgcatctcaaaatggacaattatgcatgtctataaaagagaacgataagaatgttacacaaagtttgaattctgttgcagttaacatgttagtaccacggagttataacttggtgatagaaggagaaaaaagggaggaaaagatagtgagtttgattctttcactaacaaaaaaaaattaacaattaacaactaacatttgtcaataaaaaaatgttagtactactactgccaagacctgaaacataaacataagttgagcgtcatatgaaagttgtttgaaatcaacagaaagttacaaacattactctggtgcaggtaaattaacgcaatcctgaagaccggtgaggcatggcatgctgtaatttgcattttctaatgtccaagttatgcatttcctgtaaatctctaactctaaagcattggcttggacaaatgtaaatgattctaggaataaactatgtatgattctaagagagtgctaaattggaaatatttaaccatagtctcacggcattcgggaatttaaatgtcctaaagtcgtaccaagaaaaattcaatatatatttacaattggcaatggtatggaatttaactagggtggtcattccataaccactgacattgcccttctcagaggcggaaatggcatttatactaacctcggttgcctttctaggtagttaggggtaggactcaggatatgacaatgagatcaccacatcaattgaaaaactttttttttgcctccccattaagctctagtgaaaatctcaacatccaagttataatattggaaatatcaagtgtgtatatttttgttgaatacctttttttttttataaaaaaaactgataatttttttattaaatataaaaaaggatcagtgaaagaatattataagaaaatatgttattgaagactaatataaacacctgaatttgtctttgatgaatctgataatatgaaaattacatattaatgggtacttgtatatttgattgaaataattaatgcttgattttctttgaataagatgtcaaacatgagtattgtgaaccactaaatgtgtggatgaacttaagttgtttcagtttaaacaggatgacctctagatacctgtggttgaacaaaaaacaaacagtgactattgtgaacgaaaaagaatatagtagacccgctaattcctatcatgacaatgattttctttgtaaaccaaagcaaatttttacattttcacattcctgcttaccaaaggtcacgtagaaaattcttcttcaggaaagaacgtaaaaagtataaacaaacaaggcaattggatttgtaagtgtaactggttatgaagagacaagtggtacctcagcagagctaccaatatatatacataaaccaatcgcggaaccatatcttgcagatgaacgaatctctggtgttcgctcttcttatcttacgtacctttgtccgtatctatcagacactgaatggctttcgtcaattttcattgctcttccatgtccctgcacacattttccaagtgagctttcagcctttcattaattaccattgtttttatgtatattctcttttttaatttctttccatgccatgtccaggcatacattccacttatgccacatgtaaagacgtaccctacatcactttatatatatagtgttgttcatatattcatatatagaaaacattaattgggatttatatgaaaatgaatcaaatggattacaagtcctacattaatctataacattgaatatgtacactataattagagagtaagagtgagtctggcgcaagttcaaagtagtacctgcagatttcgaaatccatctggttaatattgaattttgggattgtgtgtgcctggaatttttatacagtttttattgtaataatgtaaataaaacggagattccttgcattttattgaaacatgggtaatgtcaatatttgcatgcatgtaaaataaaacgttggcttgtcattttttctctccatatgttgaatccaagtgtccttaggcagaaagaaggaaggaaggtaggtagataagatggtgattttcccagtacagcagagtgcgagaatgcattccagtgcacaagttcccaagttagaggtaggaggtttctatgtgaggtgaaggataaattatattatttgggaaaacgcaagtcccacattgactagagataatgctaaaataaagtatataagtgggaacgatcctcatcctttgaatttgctctgggagttgagttaggtccaaactcttataagatgatattaaagtctatcctagatcataacggaccacccaccatattattcacgtatcaagcccaaacgtgatagagtatatatcctaggtccaaacttttgatcattttattaattggtaataggagattaatttactttaggtttgtgggaaacaactctagttcagccaagtatcctataatggatatattgagcttattactaggtgaaaatttattcactctaatgtcctttaagaattgttgtcactttattctgcttcttctactacttgtgtaattggatggttgcttcttctgtttagaaggcagtgtattgtcagtggcacacctccactcaataccagcggatacaaatctgatttcatgttggctagtcccattagaaaagtgaaattcagtttcaaggttgataaagtgagggttgtaatatctggagaaggagatctgctatctcatcctaacaactataccagtccaagacaaatagacaaactggcagaagaaccaattaaaattagacagcaacttggttacccctcggaagatgacaagtatgtggaattgcagttacctgttgattctagggagtacggtattggagcacaggtactatttggtttgaaattaactatacacatgcattgaaaagtttcctccactattactgttcgctcagaaatttaatcaacttctgagaaaatgagttattctactgtttaaataagtaattaaaagaatacaaagtggtaatctatatcagtaaagtcaaatttgagatcagcaaatgataaatttactagtaataatggaagtgtgtaatacaaaatattagattccatcttaaaaccaactgaaatgtactacatgttccgattctatcttgaaatcaattcatattaagtttataagttagtccacaggtgtagaaagtgcatcctagttggggtaggcaatatgacacttcacgatagaacaaagattaaaggtgaaagatggcaaatggatgtaacttttaaaagtaccatatatatcatgagtatcgaaagttaattggtggcatgtgttgaaaatgataaattgaataaaaatgtattaaaagcagtaacttatgcttggaagttgagagtaaaagctaaagaatgcaagttaatcaaagcatggaatttgatgactatctgatgaaaatatgaagaaaattgacaatgaaatctacagaaaatgatcctttattaaaaatattagaatggaagatatacttaaccaatgtcagaagctgagatgcataagtatttagattaagatcatggtgtttcccgggtgatttctgataaacttctgataactaacattttgaatttcaaactcttgatatttgaattccaaatcttgcactttctcaaaacttccacaaccttaaattcttggatgattattgattattcttgtcatctttaatacatagttatcttgagtcgtcatttcctaattaatcaagaaatctttatcttttggatactataacaatagtatttataaaattttgacatatcttgtcttagtatctgacttcaattttcttaccatttcatccagaacaagaaatcaaaataaatataatttagtgtctctttatccctgttaaccgtcatatatgtacggaacaatttattttcgctcatgcatgtttcatcgtaaattattgtttcattttggcagcataagcattatttttcaactaattgaatgataaatctctgacagatactacgagatcttggagttcaaacaataaggttaatgacaaaatatcctgctgagtacgacgggctcaaagcttatggcttagcaattgcaggaaaagttcctcttttgacaccactaactgggcaccgccaagacagatcatgagatacttgaaaattaaacatttaaatttgacaggtattcgatttcaacaatcatatatgatttataaatacagcattattacgaaaaaaaaatgaaataatggtcaattttgggtaaacttttacttgtgtaacatatcatattcttgatctatcaacagtcataaagcgatgctcttatttgattactgttatgacgtgcagatttgtttttaagttgactatatgtttttggtttcgtcctgcattatttgatcctgatagaagaaaacggggattaagcgggaagggctgcggggttttgaaggagagatttaaggtagtattttttttatgggtaggaatttaaaacaaagtgaaagaatttattgtaaattatatatggagttacattctttgatgaatttaaagtagtatttaaagatctaactgataaatttggtagttgaaaattgataagctaacttatttaattaaatgtatttggttgatttattccttaagtaagatataatcttataagatgaattttttttatagtattcttcttatacaactttctttttcgtttcactcttttatattaatttgtagttcttttaaggtataaataataaaattatttgataatttaagaaatttttttatctctcatttttttaataatttttatgaattaattttttattcgctattaacataaaaagtttcacactattaatcaattaaaaactagggatgagtaaaacctaaccaccgaggttgatttggatggattaaagttttgaaaataaacactgtgtgttttattagaatcaatttaggttgtggttcgggtcgtcctagtttggtttaccattaatgtctcttaaaaatgtataattctttttaataattatgtgttgataatgttttgtataatataatattaaatttataataattttttattgtaaactatatattataaaatttaccttaatttacctttatacttttttttatgttttaactatatatataatgttaaaatcgatatattatattaaaaaattagattgacctagtttcgttccatatatctcaggttttactcactggattcatatataaataaatgatttgagtcaaaatttcaggttagataggaataaaaataaacctattataccccgacccttattcagccttgtgaaaaacgatgtcgggatgagttgtaaggtgataattacgaaaataaaaaaatttattttatattttaatagttttgcattaaaagagtaaatatttatatatgtattttaataactaagaatgttatctttatatgtataaaagaaaataggtgaaggtagttttggaatataaaaggaagtaagcgggggtaattttggaaaaataatttgcaacgatgttaaaaaaacaataagctttaattgatcgaaacacaaaatatggttattaaaaccatgcttaattctatttagtgaacgatatgaatttgcaaggttaaccttttagtaactatcattataatggtaatgactactaataatattttttatggtagaatatcaatagaatgtctataaataataattgttggtccttaagcttcacacttaaaaaaaaaaaaactaatacatcatctatggtgagaatgagagtttcgaagaattaagaattacaactcttcttgcttgcaatggttggagataatttcaattcaatttaaatttaaataatattaactatttttctatactaacgtgtttaaattttagtttcaatataatgttataggccatgtgattgagaaggacaagataaatacaagttcgaaaaaaattattgatatcacccttaaagattttgagtattttttaaataaattcttctttttccatagtttttaatatttaaaatgacatatattaaattattaactaattaaattacatttttctatcaaatagaggtaataggatcatatgtgcaatgtgggataaatttgctattgacattgattcccatcttttaaacaacctttcaaacaatccaattgtgattatactacaatggtgtatagtgaaaagttttcaaagtgagtagataaatcttttttaataatatctattttgtgacataaaataagacatcgaatacaactaattaattttttttaaaaaaattatcaagtatgatgggtatttcaaattctttctttaacacaagattgactatagatgctaatgtaaagaaattgttgagtatagttgtataaaaaaggtatataaatatagtcgaatttgtatttatttttatgttaaattaaaaaggttttattcacatgtgatttatgctgttatagactaaaaaatggagatatatttacgtcacaagtaattacttaaatgtcgggttaatctactatttatatcatgtctttagctaatgaactttaatgagataacgaataacgtacaaaataataattcaaattttgaatttttataagaataagttttttacattacttttatatattatgcatgggaatggtctttttctatatattggttttgtttttcttatttatttttattgcatagaaaaacgttaattaatgacaaaaattatgttattgtgtaaaaaagatattcttatatgagaatgatttatttatttataataacaaattatgtaatttacttatagttatacaactctactatttaatataaaatcaccttaaaattacacaaataacttgtttagtcaaaaactattttttaaaaaaataaaataaagcgagaaccaaaaatgtcctattttttttatttatgaaaaaacaaaaaagagaaagtttggttgatgaaaaggattgtagattacaagaatctggtaacgccccaccaccattaaagctaacgcggaaaccatcacaaagtccatggacttggaaaaaaaagaaagcactaagtaaattcgcgagtgagtctgagtctccaatagaaaatgaaatggtcccatcccatcaaaataagcccgaatttctcatgttaccatttaatcattccacactctatgcaacaatattttccacatccatagaatattagaatacttgacccctgcttctacctctgttccgttaatggctcctcttcctaagaatggaacccaacaacaccatgatcgtaccccacatcctaaattcacgataccttcccttaaagaacatcacagaaatgtttttcaactctcgatgattgtcatggcatgcatggttggcgtcatcatatttctctgcaccgtgtccgtactcataaggtacttctactcaagaagatatagccgcaataaccaaaacagaagagtcgacggccccatattgctcgatttgaacggagattctcctccgagttcggataacgatgatgacgtggaggagttggcggttgtccacccgatatggtacatccgtacggtgggtctccaacagtccctcatagactctatcacggtattcaaatacaagaaaggcgaaggcatcatagacggcaccgagtgttcggtttgcctcggagagttcgaacacgacgagagtctgaggttgttgcccaagtgcagccacgccttccacatcccttgcattgacacgtggctccggtctcacaaaaattgccccttgtgtcgtgcacctgtgctacgcgacgaaactggcggcgcgcatgtgatcagagccgttgatcagaataatcacacggtttcaaacgtttctgatcatcaagaggcccgcgtgcagagttctgatcatgagagggttgaagatgatgtgtcttcggcagtggaagtggaagaggaaacacatcctctgagaagatcggtttccatggattcttcttctgcttattcaatggtgttatttcgtgatgtggtggtggatttagatacccatcattgtggtgaaaaagtgaattattcaagtaacaaggatatgagtgttgttgctgatgagaagcatggtagtgggagttcaacttcaacaactactattaataacaagttggcttcaattggacgtgcgttgccaaagaggccggtctccgtctcaatgaaaatgagaagatctttttcacataacaccaagtttttgttctccagacactctaggagtcagagttcaactcttccattgtaaagcactaatttaggaggatgaaaggtccactttaaagatcaagggctgttgatggaggatgaacgtttgtttatccaaagcaaagcagtgatgcctctactccacatatgtctctgtctgtcttcccttacagcaattatctatatgctttacgtatatagtgatacaaatcatacaattatatgaaaagtttgggaaatttgaccactgttttgtatgtttcaacatgagtttgcggatatgaatatggatgctctctcttttattctataacccctccctctttttttgcctaatcatgcatcaaacttggttggctatgtttggttaacttgtatgaaacatgatgccatccaatggatttataatactcagattgtgcattgaacttgttttcataaaacattatacttgtcaaaaaaaaaaaacttgtattaaacatcatttactatttttcaattacacccatcatgtaagtagatttattgacttttataataacaatcttataaattatactaaaattgatgactaatttttttttttttacaatacatccatattaaacgctaaatccatttcctctatctatattttatgtgtctctttcttagaattactagctagtggatcccaaatatttgtcctttcatgaaactccatacatttttaaggtttattaacaagtatttcaaccatataaaacttaaaatttcatccttagacttacgtgggtcactgtattaatcttttaatttgtttttactaagcgaaataaaaatactatcattttagtcttcttaaaaaattatcaccaaattagttttgtaaagatttaatttatcattaaattagttcctcaaagttttaaaatataatcatgttagtctttgagagaagagatgttaaatttcaccaaagggatcctgtgaataatgactaaagtggtgaataaaatctttgatgagcgactaaataaatcttcaaaggatatattcatacgataacaatcttttcaaggattaaagcagtgacaaaatttttgagggatttatattctacacttcaacgtaaaaaaaacctttatttttgtatagtgactcaatatatgtaataaaataaaggttcgggatttatgaaacaatgattctatatttaaatgtagcatgctataaaaacaaaggttcgggatttaattatagcatatttttataaaatgagaggtttatgtaaaaactacaaaataaaaggaaggcttgaacaatttactctaaagattataactttacttctcacaaaaaaattaaagcgcaactaaatggcttctactcttttttttttttttaattagttttcttgtcgtgctactcaaatttaatactgctgttttttacaatgtcctcttttactttttatatttatttttgttgaaacctattttatcatttacttcattgttttaattgattgcaatattattctcaacgtttcctcttcttactttgttttttttccccacaaaatctaaagtagattttctattgacaaaatgttagtggggaatggggatcaacattttgctaaaaattttacatttttactcctttcaaaaagttttattcttttaaatagcgaaatcagcacatcataaggaagaaagtggatctattaaaaaataaataaacgaatagttagagtgacaatgttcatatgctttttgcatggatctcaaattctttttctattggctgcatcttttttttaagacactattatcatcttgtatttgttataatcataggaaatatatagcacacggttctatggtgtagtggttagcactctggactttgaatccagcgacctgggttcgactcccggtaggaccttttcctacattttatgaatgttttttcttgttcaacgttctaagtaatttagcctaattttttaaattctatctgaataatctctagtacataattttagtgactaacaaactaaattttcttatcaaatagtacatactaaaccggttttgttaattaatacatggcctgggacaatatgcaactcatacaaatgcagacaagtaaaagatttcaaatgttccacatgttttgatagatgcttattgtctgaaggtgataagcggatcaagaactgatagcacaaatagaaaaatgacaggaagcactggaatttcggacggaacataaacaactatctgaaattagctaaatatagtatacaaaattttaatgcacgtattattcattcatgaatgtaattcctattgttttgaaatttgtagggtacgattacagcaatgttggatgtgtttgatgacacgaaaagtttctacttgatattgactttataacagtagcattttatgcgactaaacagatgaatgttttgatattcaaagccatctcttataaaccaatatgtaaagtctcttaaccacctggccaactgtaaaataccccagaaaaagaagcaccaaaaatccgaaatatgagagaggtataagtgagaatcccatgaccttcccaatgggtgtgaatggaagtgcaattccaattgcagatgtcacaacagtggagaaaatcacaggccaagatgcaacatcctgtatgaaagggattttctctgtccttatcaagtggatggggagggtctgcaataggagaccttcaatgaaccaagctgaatggaaaaacttctgagtcacatcagtgtaagccttgtaataaaaccaaagaaacaaaagtgttgccacatcacaaagggtgcacactggtgcattccacaacatgaacatggacaagcctctctctgatgacttgtgaggtgtctttacatactcttcatccatcttgtcccaagcaagggcaatctgtcccacactgtagatgaaattctgagtaagaagctgtctagaagttaagggctcatacttgaataacagtgttgctatgaggagtgaaatgacacttcccaagttagatatcactgacatcttaacatacttcattgtgttgccaaaactgagtctaccatgctctactcctgcaacaagcacgttgaggtctttctcaagtaagataatatcagccatgtctttggcaatggctacacctgactccacagaaatgcttacattggcagcatctaaagctagtgaatcattcactccatctcctaagaacccaacaacatggtttccaattgattgcaaggattgcaccactcgttgtttctgaattggggtgagacgagcaagtactgtggctctttggactgtctcatggaaagtattttggtcaagttgttctagttcaggacctgttattacatgagtggtgcttatgccaacttccctgcacacccttgttgtcaaggagagggagtcaccagttaaaaccttagccttcactcccttctcggacaaacgccacagtgcttgctttgctgagtcctttggtgggtcgaaaaacgttatgaggccgatgaacaccatgtctctttcaatatcctcttcttctctcttgcttccattacttgtttcgcatatttgcggctgcaatgtcacacgtaaattgaaattgaaagtgagtcagccacagctaatgaggtgctccttattctcttatcctctcgtattgaatttttacataaccttgtgtggaaactttgtttctaactatctccattaatattcacaaatactaataagattccgcctatttaatgcttatgatgagagagatagacacgtgttgtcatgtaaaaaatcaacatgagaggaccgttccctacaataataagaagttattgtatagtttacaactgctaagtatctatagtttagctaatttccccttgacacgtagctgaatttattaactctttttcgttaattgaaaaaataaaaaaccttagttatgtgttatataaagattgaccaggactacaaataagtggtggtcatgaaccataaaataatttcacctaagagaataattttgacaatgtgatctttttagtgagtgttctatctaaaatatatgaagagaaatgtacgcccaatttggatgatgcaagaagaaaagacacaccatttccagcttccttatagctactgctataacccttaatccctcattgctcaaatcttctgagagatttaaaatctgctgataatcatctgaagagaagggagagatttcatctttatcgaaattctcaataaaagaacaaactttcaatacttctaacagtgctccttttgttaccaggaacctgccaaagaattgtgagtgtccgccttctgtttctaagatgacagatactcttcttcttatgaagtcaaaaggaatctcatctatcttcctccacttagatggctgaaacctgaatccatttgaatatacaaatgctagaatagcatcatccagaggatacttctgatcactcttaaagtaagagttgagaaaggcatagcgtaaaactttttcttggggtaaacccctgcagtcaagatgattaaccatgattgcatgattcattgtaagggagcctgtcttatcaatacaaagaatatccctgcaacatttaaaaatataagtacgcagaaaaagaatttgctagaaagatgcatatttggattaaaacaagacatatattccttgcaatatttttggaccttatgttttcattcattgttaatgatgcagttgcatcaataattgatatactagaagtttagcaccacgtatacaattagccaaattgattagaagttagaacacaatttagaccgacttatcaatttctctgtttattactacaagttcatatttattcataatgtttctaatacataattcctatatttatgtcttgataattgttaagaacgtgccttgctgatctttctttattcaaaattaatcaacaataatgatagatttttacattctggtttccactagtttaatctgcaaaattaaaacgcatgctgatctaatcattaattgtaggttccaattctctttttccctttctttgattttgatggtagagacaggggaaagcgtagttaaagctgggtaagaatggaaacttgaattcatattttattataagttggttcaaatgtgtgcaactgcatatgaatttagtgtccaagtcatcaatcagttgattttcaatgtgaatttatacttacattgatcccatgtcgcgtatagatgttaaactttttactatacatctgtctttagccatagcaagtgctccttttgcaagacatgtgttaatgatgaggggaagcatctgaggattgagggcagatgcaactgagatggcaaaaagaacactttggctcaagttaagagatgtagtgtaatttatcacaaacatgatgataacaactgctagaatgacagaaataagcaagtaaaatatccgtctgagacccttttcaaattcatctggtggtttcttcttcccaacttttgaaaacatggtgctcatgtaagtattggatccagtggaaatcactaggccagttccagtaccagataccacgtttgtgccctgtgatgttaataactaatcatttctcagcaaaattctccattcaatcagactatctctgatcggaaatttaatatttttgatggctacatcttaaaatgaagctataacttcaacggaaacaaaatacaaaatagggaattgtgttactaactcaccataaagcagatgttctttaaatccaataaaggagtgctgtgatcttctctgatttcagcagttttgtcagttgtccaagattccccagttagtgatgcctggctgttaacagggtatgaaatcaccatgtgataatttagttagctgaaaaggcaatgggaagaatacaagtgttcactaatctctaatctactaaaccagaagattttccggttgacataacacaccttacaacaagttgtttagaagataacaatctgatatctccaggaaagaggtcaccaggttcaaaaatcacaatgtcacctggaactacatccctctgatcaacttgaactacaagttctttctgaacaactctaccagcgcatctttgaacttttattggacattttacaaattccgaaagcttcatcgctgcttttgagctgctatattcctaatagacacaaacaaaggtcggaattagagtgaagtgaagggaagagaagtactaattccactgtttcaatgcaaccaactaattaatgtagaaaaacctgatagaaacgaagggtgacactgatgaaaaccaatatgagcatgataaatccatttggactgtcgcaggtaatgaatgacagaactgacaaaacaatcagaatgataatgaaaggatggaaaagagcgttccatagaagatgccaccatcttggaaaggaatactcaagtggaacatttggcccattttccctcagtctcctatcggcttctgtgaaacttaagcctgcacagaattgaaaaatactacctttcatatggcacaaaactagagggtggtatttaattcagtgatcacaattcacagaaatgaaaagctgaaaacactggaccctgcagtctagtttacatgcaaccaagacccactagcatcaacttaatggattttggatagtttgtatgaactacgtagttataagttctaactttagagcgacaacacataaaataaaatataaataagttaaacataatcatataacacatggataagattgtcttatatggtcggaaagtagacatttttttcagtatcaatgtagaattcacaaggtactgcagagtgcagatacttgcctctctcagtggacctaacgtactcgaaaaccaggtttttgtctgactgggccaaggtgtataaccaagagtagactttctcctcttccttagtttttgagtctacatctacttttcctacaatgcaattgaactcaacccggataagtagaaaaccaaaaaaaaaataaaaataaaaatacttcagtatataagataacagtaactaataactagctagagagaagtgtgaatgaaaatggaagaagatatggtaaggaatacttgaacgaataaggcgccgcaataattcaaagggtgaaaaggggaaccggtctttgtgggtatttggcctgtttacaagagtttgtcgtatggtgttggaataaggaagcatgtaattgttgttgtggttattggcaaagagggtggagactttggttcttcccataggagcattgaaaaaatgaaagaggaagagaagcacaatagttgagaaaaaattgaggagcatgtacgtacatgttgttcgatcgatggttggagatttgaatagaaggtgaacatagcacgcattttttttgccaatctaaggttagttcccgctcatgcttctaactaacgaaccagagacgaaagttaggtgcttcagtaccgttaagtgtttgcttgagtgatgaatcactatgcacgcatcattaaaagaagttattacatggttttcttcattctgtctcgttaatctctatttgacacggtattaaatatattaatatttttatacaaaatgaaaattttcattagaggttctccaaagtaaaaccaacgttaattgacaagtttataacagattgacttgacactgcattgtttaagtgagtgtttatatacacaatcattgtttaatttattattattaattaaagaaccattttttaattacaaaagttaattgagatcatgaaaatgtaaaaataaaaaattatttaataatttctctacaacattacatacaagaatgacaaatgttaaccagtatttttagaatattaattaagaaactaaaaagaaaaagatttttattgggatatacaaattacattggtagtgacttttgtttaccttttcttatgatttttacaataaatatttttttttaaatttcttaaccaatgttgtaagagcattgattattcagatcctacaagagtttcattttatattctttatttcttattgttttaataaaaaaaagtgacatttttttttggatgcttaggatatcttctaatcatgcgtcagttttttttagaatatgaatatctatttaggagattggtgttttctaataaatattttttcatatacaaatagaaagattaaacctcaaacttaagcacatatcatgtagcgcttaagcaagacagcctaactcacgcttaattagcgctatggtctacctcacgtttaagagagctgaaattagcgcttgagtgcaagtgtgtcacatgtgtttttttaaaaaggcacatgtcagatcctatttaaggacaggatacgaggatttgaccaaatttacattagagaacatttctcttgaagttgggacctgttgtgaagctttttccatgactctctcttcaagaccttgcctcccttcttcatgttttgagattttcatgtctctctctagctaaattctcctagtatttggggttggaatgtaatgaccctgaacatcttgcattttttttatattaatatatttttcatttctcaatcttctttcttattctctttctctctattttagttgtggcatgataaaccacatatttttggcttttattgcattggaatttggaaaatgttactaaaacctatacctagggtaagataactaggggtttgacactaggaatggtgtatgcatgaatacttagccatcttgcaaaccatgtgcttaatgcaaatttcattattgatttacttagggaataggaattaataatgagatttagtctttaaccactaagggattagatttctagtgacttttatggttgaggattgattgttgaatttgaagttttttagttatcattaatacaagtaggtaaagtggcatgaaatccaaccccgggcacattttatcttgatattgttgaaaatcataattattgtattctaagtgtgtgtgaaaaatcctaaaaagagtttttaaaaaacgcatataattattaattacatcttatataagtgaacgaaaaataaacgttcgtttttttcggattttacattatggattcgataagaaaaaaatacagggatgatcaagttgaaaactacatacatagttagaatgcagtacaagtccaaagtttaactttttcaacataaaagatatagataaaataatatcgaacatgaccacatatatatgttttagttataaacacgggtattagttaattagcccgaaaacaaaataccggttacaattgataactagagtgttgcttcctgcacctctctagcaacccattacatttcagaatgtccactccaaaatataattctatattatagaatctaatggggtatctgaagtaaaaattgaagctaccgaaagtttcactctaataactaatgtgtaattgggctttaaacatattcatttaattttatgtggtttaagacttgtgtcttagtattgggcttaagttagctctttttgtttaaattaggagtaggtcatgtgtaaatgtatgatttttttaagtgagagaggagaatgttaaaaaaaatgtagaattattcagtcgttcacagatgacgacgaccggacaataacttttgtatatatataaactaagagaacctttgttcttgaagaaaaacttttactctcctcttcaaaacaaatatttactcttttctatcatgtaataggttagaacatcattgaatagaagttgtttatatccttatctaaatatacacgactaatttgattttcttattaattgttgcaatgaaaagatggatttaccgccattatgttgcataagtaaatatataagtcatgatctcttattcaattagggtttatttggataagattttcttttaagtatttataggggggaaattaataaataaataaataaataaatttttcataaactaaaattaatatatttataagttaaaactcattttttggaaaaaaaataattctacaaattaacttatgcatcaagtaaattatattcattatctctggcatcaaaatttgtctgctcatagcatcaaaattcgtactgaatatctaggaaagctgaaaaaatatggaagatcaagttttttcctgtgacagtcttcgatacccgacaaataagcgaaaggaaatgggaggacaagagtggagcaaccaggctagaaagctaaacacatccaattttttttagcctccacacaacacgctttgcctccaaagttcatctcacatgctatatgcaaaataatacatgagaataagatttagtgctagttttgtgggtctgctataataagtccgacacattgttttattctcttttattttggtgaggcaggtcttatcattgatgaaaagtataaaaagatgctcgtgtgtgtgtgtagagcaaattaaataagagttgaacagtgtgtatgaatttggagttttatggtccgaaatctatttgcctaatgattgaatgatagtgaattggtgggttatgactgtacggaaatctctccgaaattttctgcatttttcaatggctgaaatcaaagtttaatctcacaaaaataaagagaaaagaaagaagacacctaatatttacatattaattattttcagacatagctgctccagcgtgctacaggtacttttgtccacaaacgaaaagaaacctcaaataataaataagagaaatattttaaattagaaaaactgggaacaggagctatccactgagcgtgtgcatgagttgtttcagaatcaagcaacggggctgcattagataacccttttagttggcagcccaaaaatgttgaacccgattggccaattccacactattcgacacatgtcgctgtgatccgtgaatttgtggatttcttttgaacaagtgtgcatgaggtcaaccgttgaatattaaaatcaaaaaacgaaaaggacaaccattttttatatatatcttgtaaaatatttattcatttttggttatcacaataacataaaatgagatctaactaatattattgggaagaaaaggtactctttttatttgatctaatgaaaaacttgagtattaatatctctttagtatatataccagattgcatgtaattttactgaaaataattttgttactaagtcatataatatttctttcaaatatttcatccaattacatataagaattcaaattcaaaaatactaattaatctaaaataatctcatattaattgatcaacatctttaattataaatttgttttattataccaatatatactaacaatattttataccaacaaacattattatatttatcataaatttattttttattaaataaaaattatattaacttaaggttaactagtagtatattttttagcgtattttacatcatccatgtattatataaacaaaccctaaaccatgctgaagaggtagctataaactgaaacaatagcgacattaagttagatctacatggccagtggcgtgactacagtggactgcgagaaacaagttagatcatggaggctgctacgttctctcatgcaactactaatccccacatgtaactgcgccaccattatagaagaagaccaagatgaaacaacaagaacaaacgagaccctccgaaacacaagcaaatatatttattcaccatcattgtcactgatgagctccaccaccaatatcacaggcacgatcttcggatatcgcagaggaaaagtgagtttttgcattcaggcaaacgccaactccaccaatccaattctcctcctagagttggcagttccaacaaccatcttggccaaggaaatgagaggaggaaccctccgaatcgccctagagagcggcaacaacgacgacgacggcgatggcgaaatagacacacttttgtccacgcctttgtggactatgtactgcaatgggaggaaggtggggtatgccgttaagcgcaggccctccaacactgatttcgaagcgctgaggttgatgcgttcggtggttgtcggaactggggttatgaagtgcaaggagttagtgaacaaagaagatgatcaacttatgtaccttagagctagctttcagagggttcgtggctcagacaactgtgaatctttccacttgattgatccagagggagacattgatcaggaactcagtgttttcttttttaggtccaggtgacattttgttttatttttatttttccaccactttccttagctttttgagctgtgcttaatcattgtggtcaaccagaccagagctgctagcatggctttaattgtccttcgaactgtttcattttattcgccctcgtagttgtgtaggacatcgtggccagattgtgatggtttcggaggagaacggcacgctgataccgttttttgtttttgtttttgtttttgtttttgtttttgttttctttccctgaaaatattaactacttggttttacttttgttgattcccgtttagcagaatcaaaatgaattgcgttttgtctcaaatctgaacagtattattaagttttagaagaatgagttttaaatacaaattaagttgagttgggaaaaaataaattatcagtttgatatttaataggtcgcacttatacagtttttgataaatttaactaatatatagtgtagaatgtattaaaataagtacgttgccagcaaattttttaccattgactttaatttaaaataactgcaggattggtttttcaacgctcaaagtcaaattagaagataactgattttgtatgcatgagcaaacatatcgttagctcatggtcaaatcaatagtcacatcaagttttgtcaaccataatttaattaaagttttatttatttttaattattttgtgtgcacaaagaaactgataaagaacttggttcttcgtggaatccatctatctgatcaagattccatgatttaatcaaagaatcttcgactttcttaattttttttactaccattaatatatatatatatatatatatattacattggacatttaactaatctctaggttgagctgaatgaaattactagaggtgaaaaaaaaattaacttctaaactactaatataatttaattcttatatagagatttaaatttgaaatacactactacataaagcaacacgggttaaaagtcggttgccacgaaacaacaaattaaagtttcactcgttttgtatctctgtatttaaatttacatttttattaagaaacaatctttcatcaattgaatttaatattttatcattttcaattcatattttatatttcatttaatatatgtataatgtagaatatttggtaaattttgtaaacattttgtcgacctatatgcccgacaaatgtcttctgataactaatcaactttaatttaaaagtttatgttgtaaagttatacatataaaactggagcatcgttttagtccaatcgtcagtgagaataatcaggatccaaaagcatttttacgcgtaattgacagctcatcatattctccttgttactaatattgcgcaaaagcaatcttacagaaataattctatccatgtttacagctttagcacttcatatttaaaacaggatctgaaagacatgcatggagtagaatccatgagttactgattttgaaacgagagtagaatcaatgagtttgagacaagtagattattaatttatataagtactagtatttcttttgcgacaattaattttaaaaggccaaaatcttggatcattggatgtagatattgagagaaaaaacgtttaagaagggaacatttactaggagccgatgtggggcattttccttcttcaaaatgtgtatctaattgcatttgtttctgattcattatgtcgaacttcgtaatcattataactcaggtaatggcttgtcaatttataatttgcccccaacaacctgttttggacaatataaaagaataaaaaaactttctggactttcactttccttagggggcgcaggaagcaattcccattctggcttttctatattttaaatcaagaatgttgcttcctacaccgttcgtttttctaatacaccattttcgtaacagtgaaatttccaaaatatccttcactattttatgccttttgcttcatacagattcgcataattcatacggattggcaaatccatttattgtattgtattttgtcaacgaaattatttgtcaacttcaaatcaatctcatttaaatatatattttttgatttttttataaaaaaaaatactgatataaggcatatgaattacctaatccatatgactcttacggattggtcaatccatgagtcatgtgtattagataatctatacgactcatacggattggtcaatccatataagtcatacgaattaggtaatccatatgagtcatatggattggtcaatccgtatgaattatatggattggccaatccgtatgagttatatggattacctaatccatatgaatcatacggattgaccaattcgtaagaatcatacggattacctaattcgtagcatccatacggattatcgaatccgtacgatagcagacaccacccatctttgcacactttgacgacgagttcgccgctccggcaaccacccacaactccaaccaaatgaaccaaaatggcaccaaaaatcaccaatgcttctcaaatgcaactgaggcgaaccaaaaatcaacaacaaacaagaagcaaaaatggtgcttagctcaactaaaataagtgtccaaagcagcagaggtattttcgggtttttgaaaaattaatggccttgtagaatttttaaatggtgtatgaagcaccattcttagaaatttatatattccccggcccttcacattaccagattagtgcatgggcttcaacagcttgtgtatatactatatagtagatacacggcaattgcttcctgcacttccattttgttttctgtacctttttaatcttctggaaagtataatttaaattgtaattttacatttagtattagccttttcgaaatgtaacccagaatgcaattcggaatggctaattgaaacatactaacatgtatccaaagatagaagcaattatgggatgcaggaagcaaagccagaggggcaggaagcaattgcctacatacacaaatgatataagaatgcgctgtccattgaaacattttaacatgtatccaaagaagaagaaaacgttgataaaaacattagtcattgtatgttcttgtacacccttacttgctatcaattacaattccataaccgtatatgcttgttttggggagggtcaagggtgatgataagcatatgctttctttttggttgaaggtaattaagcttaaaccaaaattaaaactaaactctgaaaataattttttaatctgtaaattaaaataattcttgtgcccgtaaagggacatatatgacaatttacaccacatcatatccacttaactcaatctcatgtgtgcaagtctttgtttcttactttgttgtctaaaagtccttaaaacaaattgatatataaacactatagaaaaaagtattaaactaagtaatatgggatatgagccttttgaaatactccaaaaatcccaacttaataaactctcttgctactagtctaattttttttttttatggaattagtctaaaattattagaaaatacaaaatcatagattaatgagtgaaactcattcaatgagatgcaataccaaaaaaatcgtatttttaacttcaattgaataaaattactaaaatttaaaatcaaattaattcaatgataaaaataaaataataccaataaaattgaattaaagtaactctttcaacgtaatccaattgaacagatgaccctttcaattggcactgcttgtgtatatttggtacgtagcatatggacaatcaatcgttattcttccaatccgtttaaaagtctacgattattagattagttttagaagaaagtcaagaaactactggtcaactgtttctctttcctcgttacattttttttaatctactatccaatatccaattttcaatatcaaaatcaacaggtcataaatttcaataccaaagcaatacaataacatattacgtactgtgtgacctctcgaagctgcatggtaaatgttgttaaaaaaataatattagactcgtggcaattttttccccagaaactcatggcaagttatggaaagatagaaaagaaaataaaaggcaaatatacccgttatggacctgtaaactctggaggaagttgggaagcaagttatttaatttgggatgttaatttagaaagtactattattgtagagtaatcatcaatttagtttcagaaattataatattgttcgttttaattgtttcctaaaaattataaaacgagaagataacatctaaaattctaagttctaattaatttaattcataaaattaaaacaattggtcaaatactttcaaaattatcactcgcaattataattcttaaaaaagcatttacaattataataatcataaatattaatcattaatttattattatttaatttatttgtttttaactagtgtgatctaacacggttaaaaagaatggttgaattcataagctaagtgtgtaaatgataggtaaccaaacacgtatatgtagttaactcattaattttaagtattttgcattggatttttatctatacattatgcacggttacttactagttcctaaaaaaaacaatagtgctaataattaagtatcctatcaaaacatgtcaaaaaaaaagtatcccgttaaaaaagaaaatcactatccccatttatcaaaaagagaaaaaaaagacgactataaatatttaaaatatatattcgaaacatataagtaataaatatgtttaatttaaatataaataaatttttaactaattttatcatatttaatattatcattcttaaaatatcattcatatgattttaattctatttttaatataaaaaaaatattcatgataaaaaatattttaaaaataattttatttttttactgagattaaaaaattaaataatatcaattaaatttcttaattgatatgatattagttatttttgtttatatataagtttaaaagaagtaataaatttaattataaaaagtaaaaattaatattcaatataatatgtatgtaagtaattaagtgattgaatacaagtaatttttgttaaaattaattttgaattagactatatttattttctaattaaattttgtattaatgatgattcatttatcgatcgagggttaagaaaaagaaaatggaaaacttaagtgtgtatatatgcactgttctagagccatcaagtcatcaaccactcgattgaacatgcgcaaatttgaacaacgcataaaaataaaataaaaatctggctgggcattatagctgagaaggcaacatcatttcataatcatatatcccactagggccaagccaagacagctgactagattgggttgggctttaattccagtttccaccataaaaattttcatgcgcgagtagtgtctgtgtaaatgtgtttatctttaagcacgccacataaacatgacaaaactcacgcatctaattgggaaaatcaaggacaaagcatcgcagagcaaggcggcgttgttatccaaacgcaccacgctctccctcctacgcgccacgagccacgattcctccacgccccccacgcgcaagcacctggccacgctcctctccttgggcgacggctcacgcgccaccgcctcggccgccgtggaggtcctgatggaccggcttcaggggaccaacaacgctgccgtggccctgaagtgcctgatcgccgtccaccacatcatccaccacggcagcttcatcctccaggaccagctctccgtgtacccctccgctgggggcagaaactacctcaacctctccaacttccgacacaacaccgacccgacatcatgggaactctcgtcctgggtcagatggttcgcgcagcacatcgagcagctcttatgcacttccaggatcctgggattcttcctcggaacctcgaccgacagcgaagacagggtgtcgggtctggccaacgtggacttgttgaccgattttgactccttggtgactttggtggaagggatttgcaagaggcccgagcccaacgggaacaggttagtggaggagattgtgaacctggcgcgtgaggattggggcgtggtgcaagttgaggtgcgcgtgagggtgagtgagtttaaggagaggttgggagggtttaagtttggggaagcggtggaattgatttgttgtttgaagaggttggagcagtgccaagagatgatggatggggcaagagaacttagattgtgggatttggttagagaggttaaggacaaagcagggattcaggtgtatagagaagagggtaagttgcgaagggaaactataaaattaagggtcagtgaatcggatcgcttttctgctcggcttctcaattctcgtgactttctcagcttttcctccgggaggttgatttaacatttttatgtcaatgtaattaggaatacgggggggttggggataggttttttgtaattaggattgcatgtgattttaattattgtaaggtttgtgataaggaactgaattgctgccttgtgttgtgttcaatcaaaataatacatatagaggaaaatgataagtagtagtattcgagaggaatctttcattgggagccgcaggtgcactctagatccaaagatatcttcttgtttttaattgattagaaggggcataacatgagttgagttgtgagttgtgactaccaacttgttaacgtaagcctaacaaaatgagttgtaacttcaggaaccccgcaatatgcaacgaaccagtataaataaataaaaataactatacattcgtgcatttatcagtttctttatatcttatttttctttttatctctatcgtaatatcacattattaattatattttcatcttttaatttttctttctcccttctactccgtatgccttgaaggtgaggttgtatctatcttttaaattgtcataaataaataggctaccccagctgaaaaataaagacaatagcacagcacaacatgactggtgttagctagtgtgttataccattcagatggttatgaaataaataggcattataaagtgccaccaaccataattccatggaccatgcttcatgggcgtggtcgaagtgttcaagatataggattggtccgattggatatgttatacggaatataccagaatctggccattgaacagtgaacactattgaggcctaaaagaagctagggcgacgagacgtgtgtgcgttgtgtttatattaagagttttgaacatctgttaaaaagtacagctgaaagattattttgtttgatttagattcgagtctgactgtaaactgagtttttcttcaattttaccttcaaactcagtttaaaggagaaggaaatgaaagtatactttacaaattttaaaccaaacatattcttcgtaatcataattagactgcacaagattccaataagcaaagatgttaagttatcactcacaccatcattagttttaagcatgttaaatgtacggataacaaatacaaaaaactgtagccaaaacatgcgtgatatgttatttattagggcattaataagaattcactttccatctattaagcaaagatcaatatgcaagccacatttgtgaggatacatatccggctccccgttatttattcgaaagcatccacggagttaggaatgtgacttactagttagcccgttcatttgtaggcccattctatacagtgaaatggagctatctgcaaaccatcaaaagcatatcgatggagcccatctagctccatggaacctcttgtacgtgattgtcataataaagatacatccgtttacaataaaaataataattaataatacgttgtcctttaatatatttttttcatcacatggttcttatcctaaaataatcacattaagagcctagttcacacactgtattagataagataaaataaattaatataatatactacgattttagtatccatttaatgttcaaattgtaaaaagggaggtgagaaaggagatgttgccttaaaaattgacataaataaggcatatgatcgccttgactggaactatctctgtgatatgcttcttaaactgggtttcaattctatatttgtttaatggaataaccattttgaaatatctgttcttgaacgctaattaacagattatttaaatcttgaaatagatttatttatatattttttaaaacttttcaggttcttttaaattttatttaagattatttctcacaattatttttttttgtggattcaaatttgaataacttccattcatctggataaaagaagacacatattatttataacatcattctctaattgtcatttttctttgttgtgacagcttgttttattagtacctttaatttttttttatttgtaatgttgtcaataatattttagtgcaatcactctcttctctcaaaatgattacaatgttcattgtagttgttttaattcttatccaaaaataactttttttatttattattcatatccatgtcaacttcaaccaacatcttttgttgaagtaatcatcttccatacaaactaaaactataaaataacaaatcaaatttaattatctattaaacagctagaaggaccattccgtatccaaaaaatgatttcagaatagcattttcataagcatgaaaaggtatttaagaaagtctttcccggaagcaacaagtacattctagaacaggctttctggaaaggataagcttttagaaaacctttttacaaaacggtcattttgaaagcaaaaattttaggaatgagatatacaaaaagggtgttttggaaggtattactgggcttatgaaaagcccactctagaagaaacaagtgcactttggaacaggatttctggaatggttttttggcttttggtaaggtgttcctgacagggcatttttggatgaaaaaaaaaatccaaaataagctttttggaaaggaattgcttccataataggtgttttggaaaacctttttccgaatggttattttgaaaacaaaaaaaccgttccaaaaagccagctctggaaaaatgtccacaacggtgatgttgaaatgtacctggcgtggagagttgaaggaggggatggacttctgcgctagaacctatggtgtcgagagttggaagaagaattcggttggagaagaagagaagaactgttaagcgagtgcaccgcgggaagaagagaagaacaaatagaagagtttgcgtgagaaagaaaaggaataagggggagaaaatagaaagggtaggctggggattttttaaaaatggaagatgcaagatgcaattaagaacgcatagaatataagtgtcatatgtaagtcgtgatgggttaaatacaaatattaatggtccatcaaaatgaaaggttttgtttaatgggtatcgataaatatacccttgtaactaataatatatcccttttatattattttttgtcacgagcttttaaaaaaaccttttttaattaaataggtaaggccataaacttaaaaagaaaacttattaagcttgatggattgagcctaattagcaacaatattattttaataaagatattattattattaatatgatataatatcataattatttcaaaaaaattacaaaattattttagtgatttgatgattgaatttaatgtttggtatagattaattgctatatgcatatatgggtagcagaaatagagattatttttttttggtggggcttaaaaagttttgatgacattcatgtgtaatatttataggcattagataagtttttgtcacatcttttagtttaaaattattttattatttttaatgaaatttacaactttgttaaataaacaaaaagtaaatggaaataacatataaatagttggttcacactttaatagtttaacgtttaataattttattattatacaataattttttttttatactttttaacatgaaacatgcatttaaataagctaatagattaaattagacttatagagagattaggactagaccaaaaaaacaaatccatgacaaataataaatccaagattaacttataaaagtataaagtagatcagatcagacttaaataagattcgacatagtccaatctattcactcctaatcatatccctaaagaacataaataataataaaatcatgaaaaaattatagttgaaaatccaaaaaatgtattgaaacacaaagtgaaataaaatcctaacactagcttaaaaaacacaaattacacactaaatttttttggataaaaacctttaaccctagaatattttggataaacaacctttgaccccagacaaggaagcttatatcctcactcataaagtataccatcaagcttatttcctcactcataaagtataccatcaatgttgaaccaactcaatgatcatttaaatattgtaaatagagctattcaaatcagtaagttgttccgatattgatcgtggtagactcgttaattgtcaattcgctaggtggaatcgttccacggtttcccacatgtatagtgtataattgttatgccatttgcattgtcggatatctgaaggggatgatattggaatataatacgcagtccgttaatactattatacaagtgctgtaaagttattaatccactgggtaagctatatgctattaataaatagttgggttacaattaatcggtaaaaaagaagagaagagtgtaccgcaaatgatgtaatattttcgtctataaaacttatatttctaactcattaatatattttttttcctttagcctcgcattcaagtggctcaacatgttaatttctatatcgacatcatggatgagaccaacaataacgtgcctatatgttataagttcaagaataagatttttgtttacaagtgccaaacaaatccatataatttgtaagttgtttcatccttacccaatttggaaggataaaagtaaacatagggtgtagtttaaaacataatttaattaaaatatattgatttagtaaatattttttgatttttatttaattataaatggtcacgagattaaaaattattaaataagttgatttattttcgataaaatataagatgatttctaacacgtgacaagtacaaaactgttaaattttgagtcttagttggtaattagtagcttgtaatagagctccattttttttaaattatttttagtgacaatattttattgttgatgaactttttatagagcagttttaatttatttattgacgtgatactttattgtacaaatatgtaaatattttcgttaaacattatatgtgaaggccactcttttttaaaacaaagggagaccaaattgcaaaacgacaatgaaaaggaaaaaaaatatacaatttaggaaagatattctagtttagatagaatttagttgttttttttttttgcagttgattaagatattctgcatcaatgattcttgtgtattttttgggaatcacattggtaattctcgataataataataataaagtattgggccttttgcaagaagacgtcggttggttaaagcgtactgtgacttggctggcggttcgagggcaagcctactttcgaacgaagcaaaccaaatggtaagatcttgctaaataagcctccctaatttctaagcaagcccccctttcttctaattaaaattcttattacccattatacccttgtccatgcccctacaaataggaatggaaataggtcaggctcgattaggcctaaccttggccttatttaaaaacatcaagcctgcctaatctatttacctgttagaggctttttttttttttaggcttggtctagtctatttaaaaatctgacttgacctacaagcctattaaaaagtctattttacaataaatattatatattagtgaaactttgagaattcgcataatactttttttaatttaatataaagaaatacacacattgacatacttcccttttaatttgtgggtgaaaaaaattaaaattaattagagcactctaatatgagattaaaattcactaatcacaacaaactcagttaaagattgatttatatattttttagttttaatatatatatatatatagataaataaatattaaaattaaaaagatttgaaatctttgtagtaggtttgtaaaaaaaaaaatatgtataaactaacatgacaggcctaataggctttttgtaaagcttgaatccgacctttttatttaaatagacttttcaaaaaatctaagtctgatctttataataaataagttaaacctaggccttaaacaggtcagaccaaagacccctaatagatgacctggcttatttctatccctacccacaaatgtgttattctttaaacgtcttcactcttttgctgttgcttatgctttcaaccagagagaactgaatcataccaagaacccacatcaactgaaaatcaatagatcattactcattttcactaataaataaaaaatcaactgaattatgtttgataactatagaaagatatactatgtctgtagcaaaccacccccactctgaacctctgcaaaatctcaaatccatcgtcaaccagacacaccatggacctcaacaaatcgcccttacctccaaaccactgtgaatcccttaatattcgtcgcctctactccctcttgcaacctcaatcagacttgcaaacagacccaaaatccaaacaacaaattgagatccaaaatcaaaacccctaaaatagaaaacacgactttctcgccgattaggtgcagccgttgttgtcattgtcactgtcgctggcgacggcaacagtatattgggtcccaattcgtattgaataggactgcctttggccatgctctagacccaaaccctaacctacaagaccaagggctcccctttctcatccatggcgtccttaatcctgttttccatcggtgcctcgccgttgcaataaccttcacctcgcttcttaaagacaatgacaccatcgagattccctatagtatgcgctagtttcgtgaaggtgagggtcggggcagaggaggagatagaggcactagtagaagaaggtgtcaacggcaacgccgttgacgataatgtggaaagcttcacacgctgatcgaagcttggtgagggctttgtcgggggtgttttgatggctccaacaacagtgatgtgggggtggaaggtgggctcaccgaactcaaatcggagggcgatcatgctcttggaaaggaggctagagaagaagactttggacaagttgaggcagttagtctcagcccagtgttgagcattgtagtgtgaatgtttgggttaaaggaagaatacattagttaacatgtccatgttataccatccgaagttaaaagtaatttttgagagtttttgttatgatttttttttttttttttatatttctcataaaaaactatcaaacagttatatctaaacagacataatgaataataataattttattagaaaaaagggaggcttgcttaaaaactagcgagacgggccaacggcgacaagctcgtggtgggggcccatatcattgctaaacgggcccactcctaacgtggtcctcttccccatacataattgtcattagtcattaattaattatagttagcttaacttaatgctcccaaataaaacatctttaatatcatcacaaccttcatggtggcagtgttgtattggactgttccagcacacactaaacaataacataacaaaaaatcgacctttgccgctttcttttacaacctcctctaacaatactctttgttttgatcatcaagtgtaatgtaaccaagacatatgtcgcttgtatactttcttcattctttcgagtttcgaatataacacctttttcattattttttcttacaattttgtatttttttcttttagaattattgcaaaattattttttgtttttagtacttaaaacattttaaataggaatttgatcaataaaaaaactatctgaaacatcacaggaatgaaaaacagaaaaatatatctataaaaattaaaaacaaaaacataattttacaggaactaaatgtaagaaatcgttaaattacaaaaaactaaaaaaatatttaagttattattttttatatgtaaaaatctattcatgaaatgacaattcatatatgaataaagagatgtatttgcatcccttatttttaaaaattacatataaatatttaaatatctatattttgatttctcaattttatatatttaaatttcgtgtccttaatttttttttatacttttttcatgataataattaataatcttattttttttaaatgattgtcttttctaacttaggattctagtaccacatctagataaacatcttagtgcctttttttttaattatttcacatatattaaaacaactcattatgaaaattataaaataattaaaattatttttattaaaagtaatgaaataattttaaaaatagtcttgagatcaataaatctgtaagaaaagacctatatggttgatggtattaaaattattaaaaattacataatttacaggtttctttttttatataataaaatttaagtaaattgagcctgtcaactcattaagaaacgaccaccaacaactaagtccgtaacaagattttgttggcaagttttactttatattaagagttatgtatttttttttatataaattttaataattaacaataaatagtatgattggaaaagttgtagcaacaaaaacaatgtataaaaaagaagtgaaacagagaaagtgttttatttttttggatactgagaaagtgtttgtttgtgtaacgaatattttgtgttgaatataaaaaagcaaaaccgggcacacattcgctggctgccacgtgtagtgtggtatggaaaatatgaaaatgccaagcgaataaataccctcttgtttccgtaatagattagatgaaataataacacgtattagcagagaactgaaccagttgtcgcgagcgagtcaatactcaatacacacaacaacgcgtggagaagagagactcagtaaaagtagaggtcaagactttatttattagttaagttataaagaaagaaattgggatagagaaagtggaatcaccaatcttgtaacggaactttttctctctctcttttttttttttatcagttccatagctagctgtgtggagacgacaactgccacccattccaacatacagagaggctatttactaattacttttcctcgttgtttgttccgtcctatactctcttcgtgtgaataaacatataaaccacctcggattttgtttcctctgctgtgttttaacgacaacgtgtttctttgcttaacactaaaatttcaaacgccgattcgttttgcgactttgtgttcacgatctggttttgttttgattcattcgtacgttggactgtgaaagacacgccgaaatgtggtggatgatgagcgagactggaggcaattactgttctaagaagagcgatgatttgtgctccaatgtctgtggtcaggtatatcatccataatatttttttattaaatgttacttttccgtttatgtggtgtcgatgtaagttaatctttcagctgtggcttcaattcgcctatttaatttgtggatttcgttattttggagaaaaaaaaaagtcattttgaatggtttttccatagaaaactgttgatgtggtttgtcatgtaatctatcactggattgtgatgaaacttttgtcctagatttgctctttttaggtgttgtttgttgtgtgctatttttaatttttttttttggtgtgtgaacgagattttcgagatctgaatttaggtatgggataaggttgcgttttttatgttgttattattattattattattattattattttctctaattttaggaaacccgctgagctattttttttggcttgtaagtgaacgcaaacgaagacacctttttttttttctttccttcttgttcctattttttgggggattcatttgggagggaaaggggtttcgtttatgttgtagccataattggatttgaatgggtgcaaggtttctcgcatgaagagcttgcaatttggggttttttgggggcatggtttcttttctcttcatgatacagcttttggctttatgattacaattggggatttaagttatatgatgcttgaaaattttcatcaatagagagaggagcattgggtttttgataagattgtgtatgatttaatgaagctgcatatgatatttatttcatgatttttcattcttgaagctggatttttacagtttacttatatgtttgttccttaattttgcaggaatcaagtcaagtatcaggcatgtcacgaattcgctgcattctgcgtggtctggatgtgaaaacctatatattcatgtttgctattatcccaatgtgtgtctttggattctatatacatgggcaaaagatctcctactttctgcggccactatgggaaaaagcacccaagcctttcaatgtcatccctcattactataacgaaaatgtcaccatggagaatctttgcaggcttcatggatggggagtccgggagtaccctcgacgtgtttatgatgctgtgttgtttagcaatgagttggaaatactaaccttgcgctggaaagaattgtacccttacataactgaatttgttgtccttgagtcaaattccaccttcaccggattgcctaagcctctggttttcagtagcaacagggagcagttcaaatttgttgagccgcggttaacttatgggaccattggtgggagatttaagaaaggagaaaacccatttgttgaagaggcatatcagcgtgtagcattggaccagctcctgaagatagctggtattactgatgatgacttgttgattatgtctgatgtggatgagataccaagtgctcacactattaacctcctgaggtggtgtgatgaagtaccctcaatccttcatctgcagctgaaaaattatctctattcatttgaatttcatgtggatgataagagctggagggcttcaattcacaggtatgagactggtaagacgaggtatgcacattatcgccagtctgatgacatattggcagatgctggctggcattgtagcttttgcttccgccaaatccgtgatttcattttcaagatgaaagcctacagccattatgatagagtcaggttctctcactatttaaatcctgaaagaattcagaaggtaatctgcaaagggaccgatttatttgatatgctgccggaggagtacactttcagggatatcattggtaaaatgggaccaataccccattcctattctgcagttcatcttcctgcttttcttctggaaaattctgagaagtataaatttcttttacctggaaattgcaagagagagagatgatctaggaaagtcatttatgatactgcattgtttctgagcttgtagcttgtacagctcaagtgactctcctctctcggaggtttttaactgaggttgtgatgattgtgtgtcactcgtatagctgtatcattgtccagtgagatattctttgggaattatttaatttcagataaattctttgatctagggggagttctgtatataatttagagctggagtttcattcaaggggagcaacatctctacttatgaggactgaaactgctattttgagaacgggtttgccttcatgaaatgtgtttatttggtattagtgtgattgatccccgatatacgagagtagtttaaaattccccactttttcctgtttgggaagttttgttctgcagaccaatttattttcttattattctttatttatgctaaatatctaatccgattggggttggtctatattcataacagtgctgactcagttctttgcattacataaatttagtttggttactttcaattggatgccgttccaatatgtgatattaatcgggcgcgacatatgttgctttattttatcttatttccgtttccctctgtagaatggtaatttcctatttggaatctgttggaatctgccaacattgattttgctctataaaattatttgactgatttagacaatatgcaataaagcgtggggatgtgctatttactgaggtctttcgttagacgatggtttagatagcttgtgatttagcgcttattcatgttatcttctaattctaaagtccttctattagactaattttaaccagttaacaataagacatgtgcatgtatcatcaatgaagttcttttgttgaaaaccaaatcgtgtcggacttgatattggttcagtttcccttaggctttgtttgggagttaggaggggaaggaaaggaaagagattcaaggggaagggaggggaaggaaagggaggaaaatgagggaagttccattcttcttgtttgggagttaaaaatatattaagagagggaatagagagttaataagaaatttttataattttttccttatttaaaaaattaatacattctatattttacactgactaaggtaggataataattttattaacactgctggtataaaataataattttagttacttttccttctaaaaacctcccaaataggggggattataatttctaagcattggagggttttggaggagtttcaaaaatccccaaatcctttccctcaaaaattataactcacaaacaaggagattactccagctaaacccttcctttccctccccttccctctaaaacccctctcccaaacaaacccttagggttcttttcattttatatagggtcgatggtaagtttcctattacaattttctaaagaagggaaaaagcgaatattaagtatgtttgattgagagtggggagggtgacaatttcactttctaagatgagttctttaactcatattataagagaaaattaattatatttatttcattaatataatttataattaaataatgagtttgttgtaccaaagaaaagaaacaaatgtaccaaaaaggtaatgagtttgttatacgaatagaagttataattaataggttaactattgatttaagccatgtttataaaactagactagctattgaattagacaattagtgaaggattcaatagtgatccaaccattgtctattcttccgagctccttaatatgaagcccaaataggcattcttcgatccctaagaatataggacattcaatcactcttagatcttgggaaccataagctctacaacattcacacacaacatgattcagctactgaaatcttcttcctcccattcccataaaacctctttcattcttcattgatttctttggtcaacatatgactcatgtcacttagccaacgtccactagcatttatcctccattatcctctaaaggaacctaaaagcttgcctctatcagagtttaggaaaaggttttactttggaatttggatagaagaataaaattgatgaaccccagttctggtcaattttcacattcattgactagttcactgattatttggctagttttatgaggactaattccaagggtcattctggccagatgagggaccaattgtccaactggtcaaaccaactagtttaatctggcttttactagtccatttaggtgcaacacttttgaatatatttttcagaactaaggaggggttaaggcccaacacaaaagctaacaagaagattaaccaattacgggtccaacccaaatgctttgtagttgagaaaaggaatattaatatgccatttaatttcctccgcaaattaggaatcaaatttaactttttttcttccactcctttcgtggtgaatatagaaatggagattaatagtgacgttctaatatgactttaaaagaaaattacattcatgattcatagataactttgttgccttgtgattataggctttgatccttgactgcttaataaaaattgaataattaacgaaatacatcaaactgatcaactttccacattttcaaaaaagtgaaagactatttacttttatatatttacagttagttaaaaattattttatcctttcattattattttttaattaagtcatcctttttttttgacgttgttaagtcgtcctctatagattaggagcatctccaattattatacaattgcatgagatcttatctctacacgtttttactatgttttatatatacactttttattttcttttcagttttttttaaagtaaaatattgagattaaaactctttttcttagcttcttttttatcccactctatcttttcaacaaaaaattataaggaatataaccagagagatacatgactgtggacattgaataactattttgtttcaatttataattaacttagatctgcaaggtgttaataaataatgaactattacagacgtcagtttctgaagtgttggtcatgccactaaaataaaattccaaattgcacatgaaagcgggatatatatatatatataaacttttgtacgaatcgaatttcatccgagttgcgctatctaggaacaaattaaagttggttaaatgatggtggcgttggaatctttgaacaataagaaaaataccgaattggatgctagctccatgcacaaatatcaaataaatctcctcctccgaatatccttttgcatgccgaagagagagaagaattaaattctttcttatcatcatggaataataaaaactataaatattagctgaaattaagatgaagcaacaccacaacctagctcaacaccctcaaagttataattagaaatggcataccaaaactacaataggaacaacaacaaagggtggcgattcccctctgacgagtaccaagtgtacgaccccccagtggaggctacatatcatagtcctaggcatcatcatcacaagaagggtcatatggcattcagaaccaactatgagcaggactctatggccgaagtagaatccaacgttgaggctcgtgaacaaggttacgaaagtaccaggttatggaatcatagtgcttacaaaagtgtggaccaagaagctgaggcatttattcagtctgagcatacgaggatggaattagccaggctcatgtcaacaaggggtgcctgatgagcctctgttgtatataaatagctatttctattattatatcataggggcattatgtgcattgttacatattgtgtatggttaatttggggtacccttaaaatggttaaaagattttggggtgagacttttataataaagttttacgaataattcatccctcaatttttgtagctccccttttaaaatggcatcaaattgactcgtagccatattacccacatctcatatcataaatcataaataatctacaactgaagtactactactcaggggttttactgtttttttctttttatttcacctaaataaatgcaccaaggcctcacactcatatggcgtgttgtatttgtttcagtcctctcctttcaattttcttatagtgataatgggttgttgctatagatttccccctatttcagtacatgttatgtagaaagaatgcaaaacaagcaatgatacgttatataaaattgtgttctaaataaattccaagtacaattggttctaaataattaattaggacctgtttgaaaatttcagctcaacagaatgtatatatgttcagtgtttagattttaattagtttatcatgtttggtatcattagaccgaaatacgccaatcttcagttttttttttttaccagtcttcagatttcgaaatatattttaaggaaacagtgttctctaacatattcatacgtgttgtttatgatatgttatttttctcgtagatccctaaccatgcaatatgttatgatgccatctgcatcagttatagtaattgcacaatatatattaaaatctgaacttgctggcaagagtaatttttcaacccaagaacaaaggaagggagaagaggagttttggaaaagtgaattgtttttagataaagatgttctatgtgaggcatattatcgcattacatcaagccccacaaggcccaaattaatatatgggagtcccgtacttttactggccactttaaaattcttaaaaacaaattgaaacataaacaaataaataaataatgtataactagataatgtaagactcttgcctttggaatacggaatacccactgaattacaacacttgcttggataaatagttgaattaaatatttagtacttttctttgtggactatattgtactttcttttattgcttaaaatcgttcaaggaaaggaaagcaaagtgttattgcgaactttctgcgtcatcattctatttaaaaaatccatcttttaatatgttcaaagatggagtatcattgaagaaaagaaaatttttattcaaggaatatggctggcttgtaatcgaacataaagttatagtatttgaacttattgataataatggtagaaatgataaataaataaatgaatcatttgtcacagcccacagcaaccatgggagttgggaaatgaatctagaaatttccccggacataaacatgatgtgttgttgatggcttaaatgtatccacacgaaaagaatagaaaagtccatataacctaagcacaagattttgtattggatatttccgggaaaaaaaaaagaagaaagattttgtaatagacaagttaacaatttacgattagttaattgtgtaaaaaaaatctgttttttttaaataaatccttcgtttatcttaattgtttttgtcttcttctgtttattgaataatttatccaaactttatcttacaagattaataaaacaatatatgtcaaaataatcatctcgaaaacataaacaacggtggcgatgtatgtataagaatttggtggtgtccccctaattatgaacgagcaaattagaaaaatcaattcctttggacttgtaatatcccttttccgcgttagtcaacctaccctggaacatcctccactccatgccacacctctccttcacctgccaccaataccacatatttaagaatcaaagcccattaagaaaaacaaaacattattacactgcttcttgatcaatgtaggtaacagtttctaatgtgagaaaaaaaaagaagcaaaaagctatgtggtcaagaaagaggatcctaaacaactactaaaagaataatattagcaacacattctttacaactcaaatttattagaaattaggtataattttgtaggttgtcccatccttcatttaatgggtcttttgattttgtagattttaataaattttaatcaataataaaaaatacgttaaaaaggatgtgctaatgatcttcattatatgaaagatacataacttaccgctcgccatgccggtttttcagttgtttgtgcttctccctaccaaccacacaggataacaaaaacaaataaatattatatatacagttgcatttgagtgaaataattagaattaaattaaacataataggaataatgataatggaaaaataattacctgattccctagtgagggaataccttggtgcacaatccactgagcatcaacaactccaatcttctcatgggcaggctataacataggaagtatcagtttaatattccatatagcatatcagttccataggaagtaatatcaggtaataggcttacctcaacacattttctaaaggcaaaatcaagaccccatccatggacaaattcattctgcaatgagcagtgtgttacaatcataacttattttggaaaccatcaacaattaagtatgagcaattggttactagacacaaccaaatcaaaatctcaaaacacgttaaaataacaatctaaaattatttcaatgtcatgctgatatttttatgaggtatgaagtgctcatacaagaattgttctcaataactaatgagatatttgaaaaaaaatcaatagagtaaccattgaacctgaatcatatgccacacacagcgccatgcatttcgtgaaaacactggagccataatctcaacaaacctgcatgttacagaatggtggaatcagctaattaaagatgggaaaatattgtaacccccctcccaaaaaaaaaataaaataaaaaattctttaacagttacttacgctgcacaaggaggcagaagagggtacttacactttcctggttcctttgcttctctagtcgaaatcaaagaaatacccagtcaacacactcacattaaaacacagcacaagaaaagtagttctcttacttgtgaatttcactatgctctcttctccttgtcatattccaacacaccgctttggtacttttactaggttccaaggcaggttgtgatatctccaagccatgctttctcaccagttttaggtatctgcgattggaattagtggggaagtgaaacttccttaacaagcaaaaattaaagaaaatacacatacatcatatatctaagactcactcttcagcattgaaattctcaacccccaggtcttcatcccacatgaaaatatagtcatatggtgccacaatgtctggatgtagaaacctcttggcataccacctaagaggaaaaagaaataacaaaccatttaaagtttggtaaacaatattaactgaaaatatgccatcatgaaaatttaagcatagaatttttaccatttggtttgtttgtgaacactgacatgaatggcctgttttgaccactcaaattcatcccattccgttgttcggccatcataatgaaagaggaggattgtgaagtcctttgaaaactgttcaagtggcatatctagtttaaacacgcgtccaaaaacctatgcagagaaagataggaagagaaagggagagaacctttttcacagctgcatcgatattctttttctgctcatacccaacagtgaaagtcacaagatactttggcttaaaggttaaatcctgcaagtggaaattttatcaaactctctgtatatggagaacctcacacaacaaaaatatcggaggcactcctagtccaagtaaataaagaacagaataaagaaaaaacagaaaataatgctagaaagaaaaatatcacatgtgtcaagctaaattttttgttacttttaataagagtttaatgtctatgcactgacattgtcatttaatcataaattatagtttgaattacttaaataattaatttaaaagtcaatatacttacaatatatggtggattgcgattggatgattgtatagaactttttacattttcagtgcatgatcctttttctctttaaataaccttagcataatgtttaacagcacattaatctgtgtttagctgcatttttcttattacattcgaagggtgtagctacattgagcacataaataaactctcgtagtagacttcacctcactgggaagaccccataatctgcgcaaaaataagtctgattctgcattgactatcccaggaggtaatctttctgcacctcttggatttgttggaacccaaatctgcagacaatcatgaaaacaagtagcaaatgtcttatcatcatatatacagaccttaacatgtcatattttcaaatattacataatgtgaaatcatggttaaatcctttgacaattatgttttataattgattaacaaataagaagaggatggagaggaaaagaagaggcaagaggctttatggatctcacgctgctatatttaattttccttttcactcttgtcagataaccacataaaattctaataatatcttgttttcttccatatatattctgacaatcatttgatttgatcaattattaaccaacgctgtttctgttcacaaggcattctgctttcaataacagtgtttaatgatcatacttaagctctaaatgggagtaaacatctctaatctctaattccttccaaattaaagtcaatcacttttgaagcatgatgctcaattataagctgctgaacctttcttgactttatgggttttactccaactatataattgaataaaatatgtttttcccctaactttcttgaatcactgtacaccctacaattttcaagtccttctcatggatgacaagaagagatgcatacctttgttgcatcacttggaaactgatcttgggatgcggtgctgctatctatatatttttcctgtacacaagagagatgaagcaggccgtatggtagattcagctgcaaattgttaagcaccattagagttccattataaagttaaataacatcaactacatgaataaatatgaaatatgctctcaagcataaggtacaccaggaataagatgttcaatctctgcacctttgttattgagagtggtggaagtgataatcctacaattaagccaaaaaatcctccaacaaaaagtaacacaatatgcctcatactttcattcggtttcctaatagtaagattgcaggcaacaaaatgcaaaattatgttagtttaagggatttgtggacttaaattatagcatatacaaaatttcttaagaacaaacataataatcaacacgaagtatctatcgccaaatattatacctgcgagtagctttcaccattatatccaagcttttctgattgtttcctccatataagaaactgagatgctaattaaatgaatagagccctgtttaaagtcgaaagaagaaagctaaatggtttaataaatggaaccagattaccattcagaagaacaaaaggaaaacacacacatacatgctatgagagaaagagatcatactttggaaaataacaccccaaatatttatatagtgggattaacaaatgaaattagttatgcttccacaatgaaggtgttcgttccacttccacaatccaagtggaaaagtaaaatatcatcacgagatagttttttccaacatataaagtgacaattgggaaagtctgaacacctataaagcacgccttataagtgtgacccaagaaataacacaaggttgaaactgctgaaccgttactaagtaacgcatgtgctttccgcccaaataacctccgcaagtaacttaagcggtttctttgacaaaaggatatatatctacagcttagagcttagcaattaaaaaactaagtgcactttctttctaataagaaatatacttaaaccttgctgtaaagtggcagaactaagaccctgagtcagtgggtgtaatttatttaaaaaataaaaatttataattatcattatattatagaataattagattcagatacaaatataagaggtacaaaatataatattttaagataaatattaatatttattaaaataagagggtacatttacttatttttatatgtgaacttggtaaagagattcaaatacataaaattaagggatacaaaatataaaattactaaatataaaatataatattttaggacaaatactaatgatttcattgaaatgagaggtgcatctacccatcctcatggccatatagatcccttggtgttgatggatcctctcccttgaggtatcaactcacaattttttcaagacgatatttattattattaagtgaaatttacaatagccttcctaaataactactaaatttgtgagttctatatgaatttcatccaatatgaaaaatgtattaaaaaggttgtattacagttatatataagatatagatagagattgtattacatttttatcgggtaaaaatgtttagtgacatcaggaactacattaaaaaaaaagtaccatcaggaattccacgaacaaattcaactggttaatcatttttttcaacccgatttctagtctttttcaactttacaaaaggtaacattgtattcgtacaacttcggatggcgattgctactgtttatctactaatcatctaatttattcatgtataaattcaaccaatccattaaatcataagaataaaacttaacgacttgaataaattatgtcaacattaccagattgttaataaaacttaactaatcatccatcatattttttaaaatatattcatatacatacatatattaattacgtcaacccttatatattaattttgagtacaattgttgatggagaggactttttttttttttttctttttcacaatgggcttctcttacatatactattgtatacagtattttttgataatccactaaaatatgagacagcagaaacacgaaagccacatttgagggtatatgctgtttcttattttcatgtctagcttatgacgtgtatagtttttttttttattttaataatcgacgtgtatagtttttcttatagaagttccgttgtgacgatatctacgttatttccaagtgcttgtttgagaaatctttcaaggaaagcagggtgtggttacattgcaaaggcagctaaaatgtgcgccaactcgtgattgagaaatctgcctccttaatattggcaaacttggaggaccattgaagcaaagaaaagtaccattcaaggaacctcgttgacttgtcacctaccataatgtaacaagttagttgaattgagaaataaatattaactaataatgattcaaaaaggcacacaccaggaaatcacaccacacccaaaagaataatccatggccacaacaatcacaagaaaaggtagaatactattttctgttcaaattccacacgaaatagtggaaaagcacttggcgactcatttgagaataaaacagagaaaaaaaatggaatagaaatatcaatttttaattatttatttgagaaaaaaatgaaaaagaagatttacttgttcactctggtatatgagaaaacttctaggttgtcatcaaaagttggcaatagaattttacagttttatctaattataaattattatttatgataagctttttaacttttacatttaccttaagaatcatatttatcataatttttttttattaattgacaatatcaaaacttttatgctttgttatacataataattagactcaattatttacattaccttttttattttggcttttaataaataattttttattgcaaaataataattctatgtttagaaaagaattataaaataaaaaatttaatttttttaattaatataatttgtatacaatttatttattttcactaatctaaataagaaaaagaaaaatttccactttttcatttatttctatccatttaaataacacatcttttctattaattttttttatcttttcattttaattttttccattctgttttacttctaatttgataatatattttttcaacttgatttgttagaggtttaacgaagatgtgaagccgttccaataggtatatggcttccttgtcacatccaaattgtttatacctggcattgcattcatatttcctgcaaggtcctcaaagaatattataatcaaatacactacttacacagtaagttttatttacctatatattatctaattctctatcagcactggaatcccacattgaactgttgttttgtccttagctaggactctcaattataagtgcaagtaactagtgccacaaacttaagtaacaaaaataaaataaaattatacatcatgcaaaatcgaactatggtgatggctgtgtacaagtcaacttccgtcgttgtccccactaaggagtagtcgagttaaacatatcaactcccacggccttgtaatatgcgtcttctgcatttgccaaccgactctggaacattgtccactcccttttacacctctccctcacctgccaccaacaccatgcatggttcatcaacagacatgcatatttagtagtcaaagtatttgcataaactaacagctccatccattgtaatacagcttctcgataaattaaatcaagagttataatgttaaacaactatgcaagaaaaatgttatatataggcctattcatggttcggtacagcatagaaaacttgtatatatgaatttttgagagacgaatcaaactgtatgaaacatgcataacattaacataccccttgccatggcgctttcccagattgtgattctccctacaaagtaaagaaaaacatcatatcttacatcggcaatatgagtaaaactatttaaatctaacattaataatcatggaaaacaaattacctgattccctagtgagggaacactttgatgaataatccactgagaatcaacaactccaattttctcatgggcaggctacatgatagtgagagatattagtttaatgttctatagcatagcaattgcaattaaaaaattgaaattagatgaatttaagtaatgagaccacaaactcacctcaacacattttctaagagcaaaatcaaggccccagccatggaccaaatcattctgaaatgcccagaatggtacaatcataattaattgttagactctaacgagtgcataaacagacattaaacaactaaccaatggatatttaaaaaagaataaagagtaaacatttaacctgaatcatatgccacacacaacgccaagcatctcgtgaaaacactggagccataatctcaacaaatctgcatgcataacataattcgatacagtttggtatgggttgataagacaaaaataatgcttcaactgatacttacgctgcacaaggaggcagatgggggtcactgcaccatcctggtttctcctctgtttctctaatagaaatcacaaaaataaacagttagtacacattctttaacaaaataagtgccagaagaaaactaacactggattattgtcttacttgtgaacttcacgatcacctcttctctttgtcatttgccatgtcaatcctttattaggttccaaaccaggctgtgaaatctccaacccatgcttcttcaccagttttaagtatctgtgattgaaattagagcatatcaaacttcatgagtaaaattaaaaaaaaaatccttacgtatataaatatacattttatttatttattttgatccactatcaattatggaagtttctaacactatcatctaatcacatcttgtattaccacattggacaagttagatgatgacaaactaacttaaaagtcaaaatcttgtaatgaggaattatcaaataattggatgatagtgtaaaactttacatggatatcaaaattaaactgtgtattgtatcataataaatactcactcttctgcattaaaatgttcaacacccaggtcttcatcccatataaaaatatagtcatatggtgccagaatgtcaggatgcagaaaccgcttggcataccacctaggagggaaaacaattaaatgcttaatatcataacatagatgaattagcagaacacttttgattttagttaggcaaacaataataatggtaaaagttgcaaggaaaatttgtcatccaagatcgagcgcaatggattcttaccatttggtctgtttgcggacactcacatgaattgcccgctttgaccactcaaactcatcccattcagttgtttggccatcataatgaaatagaactattgtaaagttctctgagaactgttacaagtaatggagctagtttaaagacccatgcagtcatacacaagcttatgcatcagaaagaaaaagaaactaagagatgacctttttcacatttgcatcaatgttatatctctgattataaccaacagtgaaagtcacaaggtactttggctttgatgttaaatcctgcaagcagcaacttaatcaaatactctgtatatagatgatataccacaataaaaacatcagaggcctctccagtccaaaaatttacagattggcctaataacacaaacagaaaaaaaaatcaagctagaagaaaaaatgcacgtggcaagcaacataagttttctatgtcactatcctttcccaaattatatcaatcttggatttggggtgttatatttagtttatttcatcgaaacaaagaatctgatgaaagcatgtaagtcttctttaacaagtttattaacaacattagcaggaccataatttgtatttagatgtatttttctatgcatgcaaaaagaacatgttttctatgtttcaacccccagatgctcccaaaaatagaatgaaaaaaaaaaagaaataacaaaattgttttaggatacacacctcactgggctgaccccacaatctacgcaaatataagtctgtctcagcttcaataatctcaggaggtaatctttctgcacctcttggatttgatggaacccatatctgcaatgcagagaatcaagaaaataggcagcaattgttattgagcctttaacaaaccattttcccaatattaaataaacaaaatcatactcaaaagctgttaacaaaagaagcatgagtctttctgattctgattgttgctatgtgcttgatcttattttatttttccaattttttaacatcaccctagcagtaatttcttactctcttccttacatttgagtcaatattttatcaattaataaaagcaccctgtttctgttcataaggaattttggtttctacatttcaacttctctagattgttgatggtgaaatagtttgtgtgtgtaaaaacaagagagagagacagagagctttacaatttatgaatttaataaaattactcaatgcttgatgataaatttaggctcagaactgttgcatgactgaaactgaaaggaagatctaggtaaaagaaagccagccaattttactctagtttgttactacagcagtatttcctttggaaaaaataaataaataaaagggaagcagaagactaacaacagaaatgaataactccagcacctcatttcctcaaaaactcaagtttccatctacttaatcttaagggcctatccactacaacccattaaagcatggttcttaaaaccttaaaattgtaaactaacatcaattgataaaatatacttcattcatctggcccacttactcatcccactttctttaccatccttcattcaacaaataatgtgcatgaatctttgatgagattatgaaacctcttccaactatattattccattaaatctttttccttctcaatgaaagaagttatacagaaattaacttgaatccagcaactttaatatcgttcacaaggctgacatgagatgtgtaccttcaatgtatcatttattaattgatgctttgatgagatgctgttattattcttcacaaaagacggtgcattgacacctgcatatttctcttgaaggtaagaaatatcaatggcgggaagcaggccggatgggagattcaactgcaaattgttaaagcaccattagagttccattattaagtccaacaacattttatcaccaattgccaaggcacaaggtatgcctaacaagaagatgctaaaagtcagcacctttgtagtcaatgatggaaatgatactcctataaagaagccaaaaactattccaacaaaagttgtcacaataagcctcatactatcacttggttttctattggtagaactgcagccaacaagatgcaaatgtcaatcgatcagactttctgatgttaaatagcagataaaatttttcttaataaaaaaacagcataaacaaagttagccatctctgaagaatagaccttcgagaactgatccccattatatccaaggttttccaattgtatgctcataaaacgatacacaagggttgttcttcttcgctagtcagccagtggcatgtaccctccttataagaagcaaagatacttgttataagaaaacagtccctgtacaaagtacaaagaacaactaaacatgttaataatggaacaagaaaatggttcaaaaaaaaaaaaaaaagaggaggaaaatacaccattgtatgagataaaaaatattttgtaataaatgtgtttagaatcagatttgaataaaatctgaattattattagataggctattcattgcttcctgatttgtttcctcatcacagcagatttctattcctctttgtgtatatatgagtagctgtattattcaaacatcagagaaataaaaatattgttgggccagagcctatcctagatctattgttgggccacttgcatttgctatgctccaggccggtatccctgaacatgaggaggagtgttgaaaaactgccttaattgcagtcatctctggcccaccttagttgtggcctctttggggctgccttaaatgcaaacttattttacccctgttggctatgcttccctacaactggggtgtgttctcttccaaccacgagctgttttcaagccatatttagtattcaaggtttttgaattttgaatctctagaattcttgaagtatgaagagcttcccaatgttgtttctaattaatttggagagcttatgccttgaagtgtataattgtttgtcaagaaatttctgcagcacctctttccatcagtttcccttcctccttggccatgcaacattctgaccagctcttcagactgccaagtgtcaacaacccccagtcatcatgttttgttgtttctcttcagacctgtcaagtgtttgctatgatgtctttcctgcctctcttcagtactattcatgatagagaaaacattaaatttttatgattgtcttttggtgtgcttatttgtaacagacgaagatcttagtgagcatcaacttgaagggaagcgttagaaatcaaaactattactgttttagtcttactacattagtactacgtgacctacattaattgtgcagggatttgttaagtttagaaccgtaagtaaggagttatgttccttaatgagaaaatagattcaaacagcttcataatttgttataaatcatgtggatgcattttgtcacaatctaaacacgtcagtggcatcaatttttccttttctcatataacccagaatttcaacagttagtcaacttgaatctcctattatagaggcattttcattcacacaccccaaattgttggaaaaataaaataaacaataagcaagaaaaacacacacgtgcttttctcctaataatcaccgcaagcgacgtataagcaaccagggaggggatatccccaaaatgctccactattaagaaaacatgtgacattttcatgaaatacggagaacaccaaacgaaaattaaattaatgcaaatggcagggtaatatataaaactgaattctaaaaaccgtaaaagataacagaagaggggagaaagagaagcgcgcacctggaacgactggaagcaagatctggcgaagagagtggattttgagaagaaaaagtgaaaaacaacactcggggaagttgctggtggtagtgatctgagttcttggaggagaggaacaaaggtgaaaaagaagagatttagcagcaggcacaaaattgtcctatggaatcttctctcttaggtttgggtttgtagccaaaatacggatttgttttgcttttggtacttttggttttgatgcaacttccttctgggaaaaaatagtgataaaaaatatataaacggacacgaaaatttgaatttgtgaatactactgttgcagtaatttgttattggatttcgcctgcttctgttgcacgataagatctgttcggataattgtcggacccttttcaactgcagtgcagggtatgcagtcttcatctaacggaccaaaatttttcaagttatattttgtttttatatttaatgtataatttaatttttatggccagaatttgaagcagtcacaaaaatgtgattgcagagaattcccatcgataattgtcagtgcgggaattgaagcggaataatgttaggtgactctttccaactgattttctttaatgtgtcttttaccggttttacggctacttgaaaattcatattacacagttttctcctcattcatgaaaaaaaaaagttgacttattgctttattagtaactaggtgtgggttaacaatcagaataagaaaaaaaaaaagtaaaagaaagaaaaataggttagcactgtcagcaccaacacatgccaaggtgttggatagttttaatatatatgtagattagtagtaaaaataataaattagaaatgcaaaaaatgcatctaactttttttaaaaaaatatcttaaaagttaatttaattaatgatatatttgtaacaaataataataatgatcgtcaaataataataataatttacaaagtcaaacatctcattatacttgatgtaaattaaggaatgtgagtattgaataaataattaagaaaactaactttttctttgactggataactaattaaaattattaatttgatttgatgcaaaaattcaaataaattaagaaagataactgcatgactacaaaagaaagaaattaaatataaaagttatttcattttcataaacagtgaccagatgaataagactattttaactattcattaaacgaaaagtataatggtataattatttaaataacacagtgattaaataataatgtcaataataataaaaaaaaaaaaaactttatagtcctgtgacaaagaatagaaactaatttaagaactatatatcagtacatgtaaattaaagaaatattaaaactggtctgttcaaaaggggttatgggcctaatgcggatcagcctaaagtggatcaaatacaaattgtaacctatgataataggtaggccttatcctccggcacccgaaaaacttatcctacactcccttctcactaaaaatttaggtatcacttctaaaatacccctcattgtttatttttgatggcttgttgcgtaattattttttaataaattacaaaatagacttttctagaagtttgatattttagttatagaataagtgttattaaagaattacacctatctgtatggtattttagaatacttatattgatatcccaaaagtacgatactttggttatggaataggtgttatggatgaataataactatcctaaggtgtttaggaatatatacttttaattacttttgaatgtattacgaaatagacatttcaaaagtataatattttagttacgaaatagatatctagaagaacgataccattcataatatgaaagtataagatacacttaaaatttgcggcatgaaaatatttaatttttacacatactttaatgaaatcatttgatttttaattatattgattgaaacacacggcggcaaaactcctcaattaattttaagatttatgaaaccgtaagagagaaaatgagcacagaatttttaaagttcttcgcatgtgtgaaaacacgtctagtaactgtatggtgttttttaactatgattatgttaaaataattaacaaatgttaattctaaattgataaaaaaaaaatctaaatttaaactataaagtactaatttaatttttttaaaagataagaaatcaaattaagataaaagactaaatatataatttagcctaaattgtataaaaatgctatcagaactttaaaaattgtgtaagaggttgcatttgtccttacatattttataccattttttgctccaaatcaagagtaaaggtgaaattgttccctaaatttataacccactatattctagtcccaaaatttaaaaagttaaaaagaagtccccaaaaattgatgaactcactcaaattggtcactacctccactttgttacttaacaccgtccaacgacattgcgccatggctcatggatcctcctcacccccaaatgcgaaaggcttgaaactaggagggaggatagagacaaaagaatttaaagttggatgcgaatccacattaaccatcgacgtgttttttctttttcttttgttaatgcacgaagagaaaataattaaaagttgaaaaggaagatttttctcttctttattttttccgtccctgaaatccacgagggaggtatctaacatactccactttggagattatttttttagtagggagtctgattaatctgaagtggtaagtaaaatttaattaataattatctcaattaagaatcaaatttaaatattatttgaatgagttaggaactaatttgagcaattaacatcaatataaggaactttttttttaatttcgttaaatataaagactaaaatgaaagttgattatgtcatttacccccaaataaacttacacattttcttttgtcttttttaatctatccaaaagtgcttacggtatatggaagatgtgaaggttcaagtattattgactttacccgatataataggtttaacataaaactggcaaaaaattaatcctgcggttatatcccttaatgaaagatatgaaggtggatgcattctttaatttatccgatataataagtgaagcagaaatttggcaaaaatttctcacacacatgttgtgtgccacagtgcgattacgtaccgattaaacgtaagacgtctatatcctacattcctactcatgataacgtgtttgggttagtttcactatcctcacaaatcttttatgaatagcctactcattatgtgtgtagattagtttcatgattgatgtatattgacaaagaatatggtgtcgaaggatcaacattacagatatatctgaaaaatgttaataatatattattgttagatgaactttataacaattttattaaatacttttgcatcattttttattataaattaatacgactaataagaaaaataaatattaacgggtttttttaggaatgttaataaaaaattaaaaataaggtgtttagtaaaaatgaaagtttgtcatataaaaaattataattcgttatttatatttgatacttattttttgaaataatacatgcatattatgctaacatttacacaaaatccgtaaagtatttatctggtaataactaataattaatattattttcatgtatttgaaactagagacgtgttaggacttaggaagtacaagtggtcaatccctcccacttttctcaattgcttcatgttaagtggttataaaaatacaaggacaacttgtgtaacctagctattttacaatatccatttaaacgttttgtttagagagaaacacacatatgtacactttattaaaacaacctttttactgtcaataaattaagataaaccttgggtagcattcacctatttatagttacgtcatctatatggtgcaaattcaactgattatttatttatacttggtgtgaatttgttcgggcgaattattttaatttaatcaattttgagtttgaattttatatatataattacattaaatacttacagaaaaaatataatatgctattgaaactttgatattaattctatatgattcaaataggaatattacctgtagctgcatatataatttgtgttaaatatttaaagagagtttatcattctatgatgatgattttctcatataaaaattgtttattagttttcttataaaataaatataattttattaataataatcttagaaagaattctaattcaattaattaaacagaattcattaattattataatttttttataaaatctttaattcctacttataaaaaaaactctcacatacacaagatgtatataccattttgagttagaaagagaagatgtgggtaactaacaagcagcaacaaaaccggctgcactatttgcatgagctctctaagtgcgtgttttcttcacaatgcaacaaatctccctaattttgcatttctaaatttgtgagacccctatgtttcttgaactaaccaaaaggaaaataaaaccagtaatcctcataaaataaaataacctgcaacttattcaattaagctagtagcctttaagcatgtatctcaacaattcattattttttccttcaggaagctttgtgtatgattgagattcctatagccatgattttaaaaatcgatcagatgaaattaaaatactatgtcactaaactaacgatcgaactaataagtttctaattgatccacattatttgtcaatatttaaaaaataaaaagtttatacatctcttaccataaaatccaaaaaaattactactcataaataaaattacaatatcaagtatctaaaacagttaacataaataattgcttaaacacatcatatttaacaaataatatgaaaaccaaatcaacaatcacattacaacaacaaaatcaaatgtacaaccaaaaaggaaacataaaatgaagaaatcatgactgacaacaaattaataagaaaacatcataattcataagctttaaggtggtgggaggaaatgttgttgacgccaaagattaatcttttaaagttttcgaaggagtgagacacttaaatgcaagcatgccttttctttctttattattttagtcattaatgataaaatgacgtttgaagtaatttttttcttcaaaaaaacgctacatgaccccaacctgggtcaatgattcagccccatcaggatcaggacactggttcaaccttgcttagttagcaggttacactaggttgcacctaattgactacataactattcttctatctaatccgactcgaccaaattatcaattcacgatcaaaccaatcaatatggattttaaaattatggccataggagtattgataacttttgctcgccctcctaatccctagctcaccaacttgctatttgatagtttcactaattaatgtttgtgcattagttagaaaattaaaaagagaaagtatttattatgaacaatataggaaaatgtaaaaaaaaattatagatatataacataattttatgtatcccaataatttttttccttctaattctttaaccaatgatgttaagacattcattaaaatttatcttatttaattaatgataacctattttatagcttctgtacaaagcttaaacgtgtgtcaatttaatttgcacaataataatcccattgccggaattgatcataaccaacgaagtcaattaataacattagatgataattaaacctttttttaaagcatgtgataattaagctttaaaaatattaggtaaaataaattatatgataaagatagatacttggacaccaagatattttgttatataaataaaaaagataaataatgtgacatagaatatgaaaggtgaaaaaagaatgtttcattttaggaaaaagaacgtgacgaagagaataaaataattacttaaatctatatttggtttaaagttataaaaagtagtttacaaattttaatattaaactgtatattttaatgaaagaaaaaaattattacatatggaacaaaaatatttttcaattctcccaattttaatccaaacaaaaatgcactaaattggtaaaaaaaattcattccaagttaatcctcaacatattcacaaattacacgcacctaccacatttcttacatgattaaatgttttttttttaatattatgtatatatttaataaaacaactgaagattgatgacctagacaaaaaaacttcctttgtctcttcctataaatagtttctcattattatcacttttgatttccaagctgagacatgacttctgtactacacccactcgtgttgctcctgttgcttggagtggtggttctcactactccagtgctagccaatttcaagccatcattttttgagtttgccccagaccatgatcttgagaaaccactcaccaccactaagttcatgccttcatcaagagcccccccaaaatccaccactgaattcatgccttcatccagagcacccccaaaaatcaccactgaattcatgccatcatccaaagcacccccaaaatcaaccactgaaatcatgtcttcattcaaagcagtaccccccaaatccactactgaattcatttcatcatccaaagcacccccaaaatcaaccactgaaatcatgtcttcattcaaagcagtaccccccaaatccactactggattcatttcatcatcaagagcaccccacagtccgtaatgattcacatatgagcacttacgaatactaccacaaccatttcataatatataagccccaaccacccttcatatgagaagctaccggtttaagatggaaagtacaatttgtcctttgcctgcaatagttcttcaaaataaaagctctatatatgcctctctggaataactttaatttccctttcagcaactatatattgtaatgtcaattatatattaataatggctttatctatgcatgactacgatatgtttatttttctttgtgcttaaatcttctcgctttatacgttaaaataataaaaattaaacatatataattttatctgtacttgtttaaattaatctaacagtgacatatgtgcatattcttcacatgcatggcacattcaactaaggttttaaattgcattcattcgtgcacggtcgcataccgttttttcaaatcttgggggtgcaactttacaaaatcaaattaagactgattagcatacatataagttcggccttaagggccctccatgtataaaaaaaaagcatatataagttcccacccaagaatatcttgcttaattttgatccgaggcaaaattttcaaacatgctgtcggaagcatcttcctgcatgtgtaagagaatttgtgtgcaaaaaggttatttgatccaatttgattcagatatataatttgaaaaattagtagtctaatttatatgtaagttcaagtagtcctgcctactggaaatctttttgtccaagatgtctctgaaaaagaacccaaactttcacatttaacattttaaaaataatagggtattgagtttttaaaagaaaagaatttgtccaaaagtatattgtattttatcgcaatgcttttcatttgaatttttttggtgacggttggtggagaggtatactgtactttcacataacgtcttgaagttttatgttaaatgtagagtccatattatttgtatgatttgaattgtttgatcttagcttgttgatggcaattcccattgtgttttagcactcctagaatgacttaattaagaatagacataatatcttaaaatttagactgcttcataaagattagatacaatatctttaaattattctctcaatgtatttttaaataatttatttttgaaacaatagatatatgaaagtgccaataaagtaacatttttgctctctattttaacatgaaaaaaccctcaaaatgtataagaaaaaaatgacagataaaattaaaaaaatatttttactaagtaaaagaaaattacatgtatctaaaaaaaagaaaaattacattacaatctctctaaatatacaaaaatagaataattacacagtgtctttcttataaataagagaatacacatatctatataagaaataggccaagagaaacaccagaataactctcttatttttctctcttgggggctacacaatatccttgaaatatgtacacctacttatttttagaaacgtacgcctatgctgtagtaagagacaaggtcgattcgaaaaccgactttgtatggtccaaataaccgaccttgaatgcctatgctgtagtagtgacgtaaataatttttaaaaaaatgtttaataaaataaagtttattatataatttttattaactgtttggtatatacttatattttgaaataataatatcactaaaatttatacaaaatccataaaatttctacttaagaggaaaataatcccacataaaaagtagtaaatactttatctgctaagaatataatttttatgcatttgaaaccagaaacgagttagcaagtacaagtgctcaatcccacccacttatctccattgcttcatgtgtaatggttataaatacaaatgcaacctattttacaatatccatttatataaaaaaaaattttaaaaaaaaaaattctgtatatataactaagaagtttaatctttctcccaccaagtcagtaaattttttaagtaaagtgatatctccggtttttatccatgtccaagtcagaaattgaatccaaattttaatgaaaaaactcaaatatcaaatcacttgtgttaacaacatttggttatataaacgcttttatccaaagagagacacacaaattaaacttaccaacaattacatttttatcgagttgggggattttaatattatgcataaaataaaacaacaaaattaattaattaagattgataaacttgacatgcaagaaaatttggcatgtctctctctataaatagttttccattgttaccatgtcagtaaccgttaagatatcaaagttatttttaacggttggaaccaaaatgaaactaaaagaatttatatggagactaaaacaaattattttttatgtaaggattaaaaagtaaaatttacacaattacaaagaccaaatgaagatatataaatatttgtatatagcttattttaaagtttaaacagaccaaccaatcaacgataacatagtatcacctcgtattgcatagaagaagcgtggcttcaaattggctagcacaggagtggtaattttcaccactccaagcagcagcaacacgagtagggagtgttgtactgaagtcatgcctcagcttgtgctgatgaaaagtgataaacaattggaaattatttataggggaataaagagtaaaatttgtcttgaaagtgagatgaaataaaaaattgatcacatgaaaaatataaatttaatttttaaaaatttaaaaagtgtgacaaattaatcatattattttgtgagacaattttatcattaagttataatgttcaaagactaatttaataataaataatattttttaaaaataatttgacattaaattataaaatttagaaaataatttttatttatttatttataatattaatttattacaaagtatattaaaaaattaaatttatatttttcatctatcaacaatcaatttatctacacattacatttttgtggacggatttagttatttagccatttactcgagagagtagagacgtgtgaagtttttctatccagattatcaatctttagttattttatcataatatatacgtaatactaaaatcctcaagtcatgtaaaaaaatatgcatgcgttagagtagagataaacatattactccatttttaggtgtacgagtgaaaataagagagataaaagagaaaaataaaagagtgagaaaactataaatttgatgaaaaaaaaaggttctagagaaaaatgagatgggacgtacgataaaagtatatgtatgttaattattgtgcaaaactcacgcgttgaagttttctacgcagaaattcaaataatgactgtgtaactgtaaacaggttatctaaaatatctttttaacacaaatatcaaagttgaatttgcatcatatagacaatggaaattaaggtaaatgttgcccaatgtttatcttgattattgacagcaaagaagttgttttaatattaaagtgtgtgtgtgtgtgtgttttctattttttatgtgaatcgaatcgtaaaatgtagaatgatgatgatgaactaataatctagctaaacaaaatggcctatatgaatggatcttgtaaaataggttgcactagttgtccttgtatctgtaaaaatagacaagaagcaaagcaatggagataagcgggagggattgagcatacagttgcacctgcaaacaagtctgtattagatgagcttggtggttaaaaaaaagaggcttaaggaaggatgaagaaagaagaagagaaaagataatgggcttaaatttttttactgatatttttaacaaaaaatataaactaacatttgttttgttgataaaaacaaaatctacaatagataaaaagataactattaattcgcagagaaaatatttattgatttttaagtgggatacttccccacctagctaggtagcaattttatggattttgtgtaaaatttaactataagtattatttaaggaaacatgattagaacaagttttatttttttttatataataaactatatttttaattttttaattaatgctcctataaacctgttaatatttattatcttaatagtcatgttaattctataaaaaatgattccagatgatttaataaagttgtaagtttgatcaatcaataatttattaccaacatttctcaactctctaatcaccctcaacattttttttttcataacacaaatcatttgcagaattttacttggtaaaagagtatttaatcatatcctaaaccatactcctttttacaaatatatataccctaaaaattttagtttggtttaattaatcaagaagattaagtttactgccaagaagataaagtttaggacttaggagcattgatattattttccttaaaaaaaaaatatcaagtttctttcagcaacatgaagtatgagttccaccgccacagcttcaaattatagaggcctaagcttctgtcacttgtattagctttttaaaaaaaagttggtaatagttagcaattaaaggcgtttcttactttggcgtaactcacaagtataatttttggattaccatattattatattatatggaatattcaattacttttattgatgactaatatcgaaaaacataagtgacaagtatataaggtcataaatcataatcgtctggagcttctgttgtggtgaaaagaaattccaaaactaagcaattttgtgtggaatgaaatttatatttaatgtgccacaggcccttgctacgtaggccaaatttggatttataagttttcagggtcaaatttgagcacagtatttccaacgcatcaaagttgatgtatctagatcaattcttatgaaaaagattttactgaatatatcttctttgatgctcttttcatttcagaaggaactaatttttttataatgggctgaaacttcaattctttatttcatacttgctatagcctcaccaaaactttagcatattgccacatttagatgcatgtatgttttgtcggagaaagtgatatgttaactaatctttgaaaatgattggagcaatacgcaatcctcaaaaataaataaataaataaataaataaattggaggatgtatagataggcttgcttgttagcgaaaggtcaagaaactgttattagccaccactattcactggaatctagcagaacacacattaacgataaataagatattaatatgtgaatgggatggtcttttagagcctatcatatgcagcagtagtcggatataaatttaatttgttttttaaaatgtaaaattgatttaaaggaaaaaaaatgtaatatcatcagaatttaatttaaatgtaaataattttatattattattcaatcacatattatcattcagtttgttgatttttatgaaaagatatttaatggtgatttttgattagttaaaggaataacttttttagactttttttttttggtatggagactaacaatgtatgacagattgacagtattactttaattattaattaaaaataatgatattaattgcttgaaattgtcacaattacacatataataaattattaaattgttaaaatgcattttgatattttaatattgtatatgtgaatgaatttattatattttaaattattaattttctgattaacaattattatgcattctatcatctaaagtctaaagaagtccgggctccggggaatccatgtcattttgattgaaatgaatagttgaaatttaaacaactaaataattatatatatatatatatatctattaattttatttaataacgattattctttatttatggtggttgaaagactctttttagtcttctacctaaattttgttgttttaacaaagggaagattgtccgactgaagtttagtttactcaaagaggtcaatctcttttcgtttatttatattggattaaggggattcgcatggtacaaatgctgaagcttcagataagtggtctcttgtaaaaacccaacaagttttcctgtcatataatatgcatacactgtttattatgttattgtttacatggtgacacacagcaaagtcataaaataaactctactaaagaaatttttacgagctatatacagaaccggatacttatatttagcaacaacgaagaaagaactagtaatatctaccactcctgaatttcacaatctttatatactggccaagtgctacaatgtagaattgtatgagaaggaaactatttatcttcaatggaacttcaaactcatgctatacctcttgggcgtggctactcaaatcagacagtacaattgatgaaggaagccagagttccacacgagttcccccagctccaagaggagcatctttaatacgaggtgaaacaatgcggacgacgcagccataactctctagtatctcacgagcaacagtcaacccagcaacaaagttccaagtcatattgtcttcaatcatattatcagacaacagttctcgtccataaggggtgagtgagtgcatctgagtctgcaggcaagttcataaccaacaattagtttccattttcacaaaattcaattccctaggcataaagcactcaatcgaagaattgtttgaatagaagaagcaaggaagtgcttgaaagatgtcatattttatgaatcaagtgctatgtgtaccacaaaggaagtcttcgaatatcaacaatataatggtaattttatggagggctccacatttctatagacttacagacatgtcactatgattatgaatcatgcaaattatacgttgggaaaagctgcactaattccctcacaaaatggcatcaatgcgctgtttgccaagtccaaagcattaaatgttcccaagtttcccatggagatgcttcaaatttgcaaattacatgcataaaacaatttccagcttgtccaaaagaaaaatgagtaagcacagcagggagtgggagtgggctgaagttaccatatagtgcatatcaggtccatcatcatcaataagtacaagggtaccaccggctggtgctgccgtagatacaatttcaacctttcctccaacatgtgtgcgtagtaaagcaccttcaataagattgctgaaagcctggcgcaatgcaggttcttctacagcagctagcaaaggtgatgatgagagttcaattagttctactacacgtttttgaccccgggcaagtggtctcactgaatcaaccaagtctgccaatacttcagaaacattgcatggtcttcctgacattaatgaaaagcataagcaaaataaatgcagaaaaaatttaactgttgaaaggtaaaagaaataaatatctaaaagctaatgaaagaaacaaactatataagatattattgattgttgatgcaacaaaaagtgcaagttaggagtttattattatgggatataacagaatcaagagaatatattatatagaagatatggggataagtcatgacactatgaaaagaagcataagcattaaccaaccaatgaaacctacctgattccatgttgcaatggagcaagggccaaaggtggtagtggcatctctatatcctggacagcagcacttagagaaagtgactcactagatttttccattttatttgcagagacatcacctggattgctatctaacaactgagatcttgatgattcagcaagtatgtgagtagaaccattcattttcttgattgcttcttcattgtagcgcactatatttgtctacatattggacaaaaattgaacatcagaggcactggtttctatcagtgtttgctttccttttttgtttatttcaataacatttaatttttaaacgttttcactttaggaacctgtgttttatgaatttcaaaggggtccttgtttttgttctttatggattgtttaatgaattcttgctttatttagtatatcttttgaacatgagtaactaaatccataactgggagttacttaacgttaatataatttgtatttttcctttttcaattgggtttaaattattgtacttgttgtatgttaggaattggccattattaatgacttgagttaattgataggttgatgacaatgcacagttaattaacagatttataggataaattaggttaaatgtatgtttgattgggattaattttgaggaaatcattgtttttcataagttctcaagctagcaaaaataagcagttatttctccaaaataagttgaatcaaacatgcacttagaattgttgcatgaccaaacctcaattcttgaattccaattggttattattattaaattaacaggtcacttggttcattatgcttttcttgttttgtgccttacatgaccaaacttggtattttgacaagggaaataatataacagttcatgaccacagattgttaataggttagaagaggtgattcacaactgataagagaacacataagtatagagaaattagaatgcaagtgaggccagagccctagccaattttaattctttgggaattaaattcttaattcatgttctttgggaattaaattcttaattcatcttctttgggaattaaattcctaattcatcttcctcttttaattcttttgcagtagtccctttttgatagtttgaatagcaaaaggtttaaaagaatttactaattcaataaacatgaattgaattaatcccttgaatatgatacttaggactcaaatccctttattacttttgtgacaaggcacattgcctataagtgtatttttgcatgcaaaattatatagaggaagagtcaagagacaacaagtgatgaagattcaagatcttccaaccaacgtacattgaaattcaataagtcattaattgattgtaggtatacaaaatgtatttgcatgtatgcatgattataagtacaagagaaagaagtacctttgtcaaataaacagcatcctgtagttgttggaggacatccctcagacgatcaccttgcaccaagaggtcttcaacaatgtcatatgaaatctgtgcaattaccaattataagacatttttgacattcaataactataagttatggataactatagtttagattcaacatcctttgagattgaactctttatttccttttgcagcatgttcactctaattttctggatagatctatatttatttagtaatatttttaccaaacacctatatccttgcatttaaaactatgatagaactcgattcaaggcatcatgaataagatagctactaatcaccaactcactaagttagcacattcagtacacataaagtgcatgctgaaataaagacttttcagaatattaaatccacctaaaaaagtaatttaatgatgctttaaaaaggtgcattgtagagtcagagactagacatgatcatgtgtcagttcagctgggactttgtccaacccagctattgggttcccctattacagaaatgtaagtgcatgtgaattatcaggtacaatttagacaattttcaaacctgagttctctttgtctgtgtagacaggattttacttaaggtttgaatacttgaaagtggaccgcggatctgtataaattaaaaaaaaaaaattagaataggatgaaaatgagagattaaaggaatgcaacaacagtcaataactcatacttgctcaaccagattacccatcctgacattattttgccatgttgattgctgaagtaacattgctttctgtaaaagtagcataaccatgagctagaaatttaggcccatacaaggtgtcaaagctattcttataacagccgtgaaaccatacataaaagttaaagagaaataaattaaaagacttgcattgcaatctaaaaactaacagttactcagtcttactcgagtgatggattaaataattgtgaacttcaatgcaacaacttgcaaagcacacattcaagtaccaaatgttatgaaatgcaaatttcaaggcaactcccacaaagtttgagtagcgtcaaactttctagcatttcatatttgaatagtgatgcgttaatgtaatggtttttcttctctcttttttttcaggggaaaaagatgcagtatataaacctgatccatgacatatgccatagctagagactgtgaaatgttgacagcatttgatctttgctcagaagtgaagttatgcataccaactgcctcattcttgacctgaagattctgaatttcccttgacttcttatctaaatccaaaaagggaggaaatgaataaggttcctcaacagacatgaggttttctggtccatcaatttgagatttctgacactgttcctgctccaccaacggaagctcagcaaccaagaaaccaacaacaaatgggtgtttcaccatcggaagaaccacagccttacattcagggacaacattaacctacaattaacattcaaacctatattaacattcatcctacccaacaagaataatcaagcacggtggaacagaagagaagcacattgtgtgctcaaggtattcaacacacttgcgaattggaaagcgtggcctcagcagcacgcaagcctgcaggaatattaaaatgacccacaagaatgacaatgccttctgcctccgcatctccagggtacagtgcaacccgccgcagctccaaccgatccatcacataactaccagctggtctaacatacacctgaacaaagcaaacaaaatagctccttaaccacatcactcagttcaaatttaagaaagcagacattttagtgcttacttaggaatgtaaatttaatcccaaaattgagtaaaacatcaaattagtttctaaatttgtcaataacagccaactcggtcataaatattacaaaaagaaaaaaaaaaaaaaaagaaatttagtccctgtctctattaacaatctgtcgatcaatttgatccatgaaattggatcaatatccaatttggtccctaacattaccaaattagccaatctagtgcctaacatctgctagttaatttggttaaagccatgagggacccaattgactgactaatctgcacatacacgaagacccaacaaaattggccaaattcaagactaaattgatggcaaggttttataaaacactctgcaaccgcgatttcagccaccacatcgaggcttttgttgtctttgggactgaaattgcaattatatcaactgcattttccctcaaatttctgcaatataaatggattacaacaaaacctaaacggggatggcaacttaaaaccttgattgatggatgatactaatttaaagaagcagattagagtttgtttgacttatatcgaatgaatcatcaattcggtcccccccccccccccccccccggccaccccaaagtattattctctctccacagtaatccctcaagtattgaatatccattagtttgatctatagaaaattgatatattttaataatagtccgggatcaatttgaagagtttttcaatatttgaaagagtacttagcacgatttctaagacttgttatttgttggtagagaggataatacttgagagatgaaattgatggtatatttaagcgacttgaattgaagctaacaaggatgcatgcagatgagataattaaaaaaataggagaaaggaaatgagaatcggaaccgagaggagggtttcgggaatgattctgcgaaggagatgaagctggtggaggcagagtcggtggaagtcggtgctgggaagcaccagtccgctctggcgctggttctcgagctgctgggtgaattggacgggggaggtggaggctttgcgaatggaggcggcgactgcggcggcggaaggaacggtgaggcggagggcgtcatcggaatcggaggtagggttggcgttgatggtttggaggaagcacgaaggggtgtgtgttgagaaaaatgggcggtgggatttggagttgaaggggcagaaagtgtgagtgacacctgagacaagcatttgccttagctacacctaacttacaacaacttacaaaccaatcacaaattctgccaactcttaactaaattttggcgtagcaggacagttcgttccttgcaacaagtgtggagataagtcaattcctctcattctaccattcatctacagggaagtatgttatcccagcacaacaactcttcaatctaaaaaactactattttttttatctcatcctcattttaattcttaaatgtctaaaaatttgctatagttacatttttcttataactcagtttaatgacaatttttgttctttcaataattaaattgtcctgatttttacacatttaagaataaaacaaatatttatcttatatttattgtatattatccaggaatctaattgagtaaatagttatataaatctattgtaatttttttttatatagtcttttgattcttatcaataaaaaaatgtaaaaaataaagaacaaaaggaatttatcgccatcatttattgttttctttaacatcccattataaattatgtattttgttcttttctttcctttttcagactctttgttccaaatttttgttttattttttaaattattgtcttagttttttttatacctaacttaattttaaatgtattttcattcttgttttctgaatggaaagataaaaaaactaattattttttattctttttctctagttaacataaaaataaaaaggacaagcaaatacaaggaagaggaaaatttaaatttcgttctttagtacaaaaagaaaggatcaacaaaataaaagaaaaaggcaaagctgagtgtttacattttttatttttggttattaattacgtatttacataaagaccaaacataaatagagtgaccaaaaggttaattaaattgtctacataaaattataaaatgttacatggttgcgaaaaaatgactcgttaatcagaaacaatcatgaatcgcccaaaatactaattttgaaagaataaaaatcagaataaattttaaaaaaataggagcaatcaaaactcacaagaataaaggaaataaaaaaaaaaaaaattatagtattgattatatttctcttttttgtttcataaggtctatgaattattttctttgcaaggtgtatatgttaaaatcttaatttagcacgttaataagaccctgtttaacacgtaataataataattaacatgctaaatgtcattaaatatacatcaatgataaataaaatttgccaaacataattcgttaaacactaaataagacctgtcagtttaagcacatggatcgaaattcactcttacaagaacatgaatttatgtgtcctaatggattaatcgctgtggatggatgatttaccataacaagtcctttttaaagagttaggtggatctgaaaaggagccattgactatttgttggaagatccatttattagcagcttcggtgcaatggactccgtcccaaataatcctcacacttggatctttgcatgaaattgggtatgatctctgttccattcaccctcttggttgctccacatctctctgtattattgaagttgtattaagaaaagagattcaattaagtatatctatcttatctactccgacttctcaccatgtccaaagcatgctatcaccccctcctcaaaacctttccattcaaaacattgcatgttgagtatttcattacattttccacgtttaaatatgcaacaacaacaaaagaaaatttcataaccctatgcatgtggtattttttgttgcttaccgtatttttgggcatggctaaattaatgagtgtgtacttcaagtatactcataaactatatcaaaatattttattattattattatgtatttattcagggataagagaaaatacaatcttggaataatttagtctatataattcaaaaattataaattgcttttcttctcaatattcaaggaaaaataaaaatatgagaagaaaaatattagtctctttgtttatttttcttcattttcctccacatttttaaatcaaataaggtataaaaaattaaacaattatcctatccctccttcattttcctccaactaggaatgttcatgacgcatttcgttccaccaatctggcctatctttagggaacttttgacaaatttgggtttaagaaattagaccaatgtatttaaagactgattcaagttaataagttgtcctaatttggtccaatgttatacattcttaaaaggcatagttttctatgcattaatattaaaagtttctgacttaataaataatgttttgtttaacatgatattatatacttttttttttatagttgtatactttttaaattctataatttagctattaagactaatatatcatgtcagcaaattgaattagcttcatcttgtcccaaatgttggatcttgatcgagctaggtactgatataaattaacacatatcccaaacctatgaacatccccccccccccccccccccgagaaaacatagagatgataagaaaattttacaaaactttcttgtttagttcaaaattttagagacaatgaaagtaaaccaaaaatcctctatatccattcttgcatttcatctaaatataaaagatatttgaagagaatgaaaaatattaaattttattcgtggtacttactaataataagtttgaaaatttcaattgcttgaacttatgattttatttgtatactattaaaacattaataagctaaattttaaattctcctattttaaaatctaaacaagaagcgctagtcttaaaatctcccgcccctcttgagtctcttccccttcctttgaaccacaggccgtcagaaatcatccagctgaacgacgttaagcttcccatctttgaccaccgttgatgaaaagaaccactaacacctcaacttttcaagtaggtatgaagatgcatatttaaactaaccaatgaaacaatgttacggaaccagtttatggaaaagcaaacacaacactagacgtgactataactattaactttttgtcatagagatggcaaatatcactctttaaaactttttcccaaggttggtgatatcagattcagcagataaacttaaaaactcttaggggttgtttgatccagtaataaaatcataacttagcatgcacttttcatcccattctccaaaccatagtcaaggacctttagggagtaaaaggtactttccaatattaaggatagcacaggataatacataaatactgggatatccattttcaaacaaaaatatgatactaaaactggccaatgttacaagtagaggatagcggctttaagctaccaatcttacggcactaaactggacaataccgtgcagacgcaaaattgaagaaaaatcattttatatcagaaaattcagaacattatcacattaacattaactagtaagtttcaagattctcaataaaaattttgtcctaataaaattacaggctttctgccttcatccagacacccaaaaaattaccagaagggggaaaacaaatttacaatgtttcgagatgcaataacagattaggcaaaagttttagtgccattactcaatgattgttgctccaattgcctggagtaaaatgagcaaaacgattagaaagacaagtaataaaatagtagtattaggttctggtcatcaaaagttgaagataactcttaatccacacaaaactgctgttcaccatctatctcttgacgttgacctgtaggacaacaaatatcaacattctcaaacactttttcccaaaatgtaaaagctatatatgccaaataatacaagagaataaacaaaattgaattcaaaatcaaccagttgccataaataatgtatgaataacacttattactcacctatttaggtctctgctgccagaaaaccatcccctttccctgctaccttgaaactgtcttctgtcatcactaggatgcatccacatatctcctgtaccacgagatcgaggtctgtctgtaaaatccacacttctagaatcctcaaaggagccagatctagaatgtggcctatcagaaaaagtagaagactttcccgccgatgaacctggcctttcaatggctttctgcccaaaacgaactttgtcatccaaatcacggataagaagttccagctccttttctttcagttgtaatattgcacgtgtactggtttgatctccaccagcctcatccgcagattccttgtttgaatttattgtagactctttctcaagttccttctttaaattatcaatttcttcttttaataatttttcctccattgtctcgggcctgaaataactcaggagtcaacaaggtaactagaacttttgaaagacaacaattcacaattaattacacaaaattatgtagcaatgttgtgcataatctggcaagacgaacaaaataaacaaagagatgatagagatttatgaaagcaagtcctgattaatgccaaactattaggagtaaatgatatagaacaatgattaaactattagcaattcacctgttggaaatataaggttcaggtaaggaagaagaaaaagatagaaagataaccaatatactgaaattgatacatatctgccatacaataccacaatccaatacttctatttacactagaaattgtgtctagtactggtacaactactacaagcccaaggcaaataacactgaaacttagtaatcctaggacagctttcaataacagaatgcagccagaaaaacagccagttagcgatagccagcaggttatctcacccaggctgaccaaaagtgacttgcaaacaccagcaaccaccctttggtcacttaaacagtagggcaccagccaaggttgattctgccgtgtttaggacacgaacttaggtcacaacaaggattggagacttaaaaatataatataaaaaatcatagatcagaaaacacaactttgacaagctcagtgaagcaaaaaagacagatccttatcaataaggaagatacagatctaatatcatgttggaattataggttaagaattagaagagaaagaataataataaataaataaaaaaaccattgcccggaggttccacgctatgcacaagtaagggggagggatattgtacgcaaccttacccttgcacatgcaaagaggttgtttccggattcgaagaaaaagaatggggaaaataaattaacaaacagtagtaaccaaccaaaaataagtctgatacactatttataccaataacttgaagaagtactacttgagggtgagtcttgacacagcggtaaagttgtatgttggtgatttgttggtcagggttcgaatttggaaatagcctctttgcatatgcaagggtaagactgcatacaatattcctcttccttaccttcgcatagcgaggaacctctgaacaatgagatacgtagttttttttttaacttgaagaagtactacttctgcaagtacaatctcaactctacaacactagaactaaataaaacaacaatcaagccttttcccactaatcagctacaaggatcaaatgacaacacaattttctataataaatcatgtctctatagacaaaccattaacctctaaatccttcttaatggtttctcgtatagttttctcagtttccttttgtctctagtgattaggatcccctcatctaatctactctcctaatagggtcttctccacacatgcccaaataaacaacctaaagcaagattctcctaaaaagtatgtttatttaaacaagagcaatcgacaatgtgaatccaaagcatgtctcaacatcccaaacttctatttatttcctctcgactcttcaattacgattataacatttgcaaaaagtgttcatcatccaacacatgcccctaatattctaacaccaacagatatttatttctcaactcatttctgttttgaaagaatatcaatggatatatttgcttcattctgtccctaagatatagaaggtggggctaggtatcactcccttggatgacctagtattcactacaaataaaccccagaatttatactagaagccaactataaaaacctttcaatgataatcaaaagtgagaggtatacatataccaacataaaatcccaggcataattttcacatggattccacacatgattgttgtggtgcatctaccatgggcattgtcctcattcaataaattttcaataactaaagaaatgaggcaataattattttacagataccaagtcttttacaggcatgataaaacttgactgggaagtcagaagttctctatggcatccataattcatgtatcatcctaagaaggtttgatttctttcataagatttaactgaaataacaacaaatagctttacaaaccatatagttctgaatttaacagagaaaaatagaaggaagcttcattaacgtagtaatttattacatggatacctatcttatttttcataaccactatatgacactcacaattagctcttgatctaggaatagaatatatattatatagtaaccatttactattaaatcataaaaaataatgatgttcacactcttctcttactcccattaaaatcttactaattagaggagtaaaaaaacgaccaccgtctaattagagtagtaaccatagaacaatacatgaactatataaaacaacacgaccaaaatctctaccaaaagcatttccaactctaaataaaccgttcccaaccatttattgatcagtctaatgaaatgtcattgctttaatccaatcctagtgtacactcttgattaaattttacctacaaatcatgcccatatgatatgcctaatctgtaaatattcccataaatcaaactaattcaacacaccacaacaatccacccttaagcacatttatggtcattgcataatggggacaaaagctcttttggtatgcaactattgaataatgcgagcaaatccggtatgatcagacacaaattcaagttcaaacaaaaagcctagaggccaatctaagaccattaccaatcatccactacaaacaaagcaacatttacaagttcaaaaaacagatcaaagaagaaatataaaagcatcaattgacaaaaacaaacaaaacaaaacctgtcaacagagcgatgctccaattcaagatcaattttcctccaatccatgcctcgctcgcccagcacagcctccctaggcttggcatccccaaaggggttcaccttgggcctcgatttcaccacagcatcggttccctgcaacccgggaccctcagaacgattggactgagcactggaaggcctgctagagtgcgaactcgggggacggctcgtcttcttcgtctcaatctccgaatccatctttttccaatccaaacccttctcagccaacacctgctcccgcggcctcgctgcgccaaacggattcgccttattcgatgccttcgccggggactcgttcaccacaccatcgcctcgcggcggatccaacaccagcctcggtcgctccgtccggtcaacctcacgaggcggaccgcctctcgtccaccgatcaggctccactcccgaatcgcgaaaaccagaaccgaaattggaagatctaacaggaacaggcttcttaccaaccgcccaattgtccacatcatcagccctagacgcaccaccaaaaccgccgccgcctccgccgcctccaccagtaccgccaccaaaaccgccaccaccaccaaaaccgccgccaccaaagcgattctggcgaccggaatcgaaggcagggagagatttcttcacagacgcccaactttcaacctcatcagccctggacggctgatcgagttccgaaaccctaggattcggacccctgcgctcctcgtcgaatccgctgtaggatcttctgcctcctccgccccacgaaccttcgttgttgccgccgtcgcggtcgcgcgagcgaccgccggagcggtcataggagttgaaaccgccgccaaggcggtttaactgcatttcctcggcggaacgctccttgggaccggtgggaagggcgagcatctcgtcgcgcgtaaggccctggtcgaaacctccacggttgaactcggaaagcgtgatggtggttcccttcttcttcttgggcttggagttcacggcctccttgaggctgggaaagctttggggctcgaccgccgtggccgcagcctgggcctcagcctcctcggcctcggcccgctcggaatcggcggcccaggctccgatgttgccccagggtttcgacatttcgagatctcgaaagggaagagaaaatggagtttagttttttgtttttgttttcgcaaatgggtttgaactgagccggggctccgctagtggagccggagctccgagaacatgcaaaggaagaggaagaggaaggggattaggagagcgtccgtgcgtgcgttgatgcgaattgagaatgagaatgggaaggaagggaacattagtgtgtgtttcatttgggagcgtgggcgcgtgggtttgggaattgctcacgcgcggatgaggggttcacggcctcattccaattgggtattcatggccctggagcaatgcgtcgtcgtgttacccaccttctttttagttaatgttttattttaggcaatttttcagtgcaaaaggccatagatatttttagcattttttttaatttaattataaatagagtttcataaattaattttatattataaaatacagtagtagattcgctcgtacgctagaaccctagttgaagcacttgccgtcgcagctatcacactttaatttattttttcgttttgactttctttttctgtgtactttactaccttaccagttatgttttgacctctgtttttttccttcttctgtagcttattgttatttatagagtaaaatttcacaactatttttatgtaaatgaaataaataaaaatttaaaaaataaatactatgttaaaaaaattatttttataaaaatatgtaaataatattactctttttgttgtattcttccatttcaatttttttcgtgcatcatttcaatttactttacatattcgtttacatgaaaaataatactccctctattgtcctaaattatttgatacaggctaaaaataataataaatggataaaaaatttataaaaataatcttataccattattaatttatttataaattttgttattcatcattatttaagtttaaaattggttaattaaaatgacaattatttttggataattttttttctcatatacacaataattataatagatggatgaagtaatagttcttttttcatttaaagttatgcttcttaaatttcgatcttttaaaattcaaatcaatcatcaaaatgatgaaagtattaattcaaactttattaggaaagtaataataaagaccattaaataatatttagtctaaaaaaacatatgtttatttcaaataatagcacacagattaagaaataatcaatatttttatttatattaaaatatttttaacatcataataaatctttcattcactgttgctgtatttaccataaacgtataaaacataaagaaaaatattactagcatttgaggaaagaatcaaaagtagagtttctatttatttatttttacgtaaaaaaaactaagctaagaccaagtggttgcgatcagtggtgttgggataggcatctcgaggtcttgatagatggtgcagatgtatgggcgatgaagtccttgttggtatttctcgaggttatgtggataaacttgctgatttttgttctgcgggtatattcacatttggataatcattattcatgtgttgtataatcagtaatagtgattaacctctgttcgtgggagaatacttttctatagttatgggtgggttgtatttgctgcaaacttataggtgtccatgcctggtacactatattttgcacagcttgtgctttctctatatataattattatacttttgccgattaaaaaaataagtgattatactgatgtgaattaggttgacaccatacaggcctcaatagcaaagcccaaattcatagaaagaacacggcaagataacttggaggacatgaagcctgacccaaggtaaccaaaacaaaaattataatcaaagttgggatatgattccactaggaaaatcatccgttcaagtgtgaaaaatactttgaagtggactagttctaattttttggtcagtcaagttcaatgaaccctcggatcaatttatttaacccactttaaattttttgtctatatttatataaatctaaaaaaaataaatcaaaatatattcgattgaattcgaaattttgtttattgagtctaacttggcctaaattggcctcccataaaggtcgtccgttgttttggtccctctctatgtccatcgtctatttaatgtcaaaactaaatcattattgactacttaattcttgttaatctaattagcgaatgattagcataacacatcataaactatgattttctactttggtggcactcaactaacttattagtacttgtctctaaatatctacatgtttgggattggttgaaaagactttgtcaagtaattgcaatgtaatgcttcacgcgcaaagaaagatttcaacctttttatataaaaaaaaaagatttcaacctttcatcaagaaaggacattcgaatattattgtaaataacaataataatgtcttaagtacacgctatttttttatatcagagtctatgtctaatataagtacacactattctcaattaaatggtacagcgagtttaaatttgaataataatagcattgtcaaagtaattttgctttcttttataagtttgattttaatgcattattagtgtagttcattttttttccttcacaatatcaatcaattggctaatactctatgtttgtttttgaaaggagtgatagaaaatgttaaccatttttgtttttaagaacttaacaattcttgatttcttgaacacgtgtattctatttttcatactacaattgcatttctattatatcattctttcacactaaaaaaattagatccttcttttattaaaaaagttatgtttgtttaacatttttttcacaatgttatgtttctgattgaccatgagtctaggcaatgagtcagttgctggcaaaattcttgttattcttctccgcaagaatttctgctctagctcagtgaatggggatttgtggaagaagctgtggacagttcctacagttcctaagtgcttcaacttggcattgaggacttgccaaaatatactcagtcgtcattgttatgaaccacatgtggctgggccttgaaactgcaacggacctccttttataatctgtccggtatgaatctgattgcaaaagactcgtggatgcttcgaataataaccgttttcatgacaacaactactttgcaggtgtgattcaagactgagctctgttgctgaatagaacaaattttgctttgtaaatagagttgagaataaagcgacagattgtgtagcccaccttacttttatagaacatgatatatctttgattgatgacattcctcaccaattgcccaatgttgttcctgatgatgtacgacctttgagccttccttctgattaaaaatacaccatccttataagaatataagaagaaacaatgtaaattgtataattcaaataaatagttaaaattaaaactaacaatcttaactattcgtatattgtatgatcaatatttatttgatactgtttatattatcatttatttatacgttatatatttagcattggatgtgaaaagaatatatttttttactagaagtacatcatatcattcttattaaaatatcatttgcattacaatcaaaggcaaaatgaaaaatctacggattagctgcataagccgatttcctagctaagttagggccatacacatatgctcctaataaactaaatttgataactagaaaaagttgtaaatgagcaattgcaatcaacaagtatcgagccaaattcagataaatctcttgcttctttttgcagttggtctaccactactttgctatcagtcttgaagataacttgttgctcacccctctcagcacatcatttacttgcatacaagagggcaagtgctttcccttctctaggctgcaaagcaggtttaaaccaagctatcttttttttaaaaaaaaaaaaaaaaagtaaagaaagaaagacgaaggatcaaggacagatgggggttgacatcccaacctttaatctcccaaaaaagatcctcctctaaatatattcattagaagcgaaaatacaaaacacttgggtacccaaggaataacactaagggaatctataaaatgtgagcctttgtctatacctaagaaactcgtgagaaacaaaaaatggtagaggatcccaccaagtatacccaaaagagacagctctatttacacacaagttgtctttatgataaacgtgaataattttgaagttaaaattgtcagtgaactttttacaattcatccatctagtgtaaagtgtccaatggacaatcttcggatgagagaaagcatgaaggtgaagtttagaatccgtttccaaccaaaaccagactgtcttcactgcaacaaaaactctaacttcatcccttaggcagagacccactccagtcttattatcctcttcgaaaatggctgtatctacatagcaattgagaaaaccatgagtatttaattacgggtttatgattacctccgaaatatccaactccctatttccttcctgcactgtcctagctttctgcccatcattcaggacagacatagctccagatattaccattgagcttgtctccatccttccttcccagagcttagtattccaccgacaccaaatactccataaggacattgccaccttatacatatatcttaaccatataattgcatcagaatatcaaaattattttaattttagccatttatttaaattatacatttggatttccattctcacctaatatttttatatatgctaatgcatattgccaaattcatcttcccttccaaaaaaataaaattgagatgaaagttttacattaaagtagaatgtaaatatgaaacttataccaaaatttgaaattattaaaatattttagtttgattcttggtattttagtttggcgtatcactcaatttcaatgcattggatgctgcttgcaaaccacccaatttctttgatccaattatgtcaagcaattatatttagaagggtcctagtagcaccctaccaataaatgagaaaagaaagaaagaaaaaacaattttaaacatacgtaaattttaccaatgtatcaaaagtgttaggaaatatatttgttaagactatttctcatacatgtatggctgtgtttgtccagtaacatgtaagaagaaaatcgtattaacagcaaaaccgcttgatcagcacaatactctatccgccagtgataaaagaagagcgagacatttgtttgaaaaagaaaatacctactaaaacccaatacagaagaaccatttgggtcacagcacataactctatctgacgaagttcaatgtaccattaactggtgaaaagcaatacacaaacacaatttataagattaaacactaaaaaaacacttttccatcaaaactcaataaaaagcagaaaaactctaatcaaacagtcccaatcccatatcatcgtcggactcttcctccaccttttcttcctttttctcagcagccggggcagcatcagctgcagctgcaccccctgcaggtgcagctgcaacagcaccaccgccacctccaacgaatacagcaccacccactatcacctgaacaaaacaatcaacaaaggaaaaataacctcagtgacccacttaattattgaatccaaaagttaaaccagcaaggcagaaatgccaccatcaatcatcaatagcacaataattcatttagtcggacaagtgtattaagtattgttctccaattaaaattagtttcatttcgatcatcatctaagcaatgttaccagagtaaagcttcaactatggaaaataagagtcagttttctataatggacagaagctgaactccgtaaataacagagtcccatgtctaagaacatccttaaaattaataccaactaaattgtctaaaaatatcagcaaatcttaccagagtaaaacttcaaattttcaaaattgcactaaaagctttaaagtaactagatctaaatttgtacttgttttatgcgtgcacaaattatatactttcaggtaatgaacaatgattaagctttgcaagtcatagcactaaaacctataattctcttcaagtcagcgcataatctcagagtaatctgaatgaaaaaccaaaaaataataaagaaaaaataataataaagtcaaactattaattccacaacagaatctcacaaatgaataacaagaaccaaactagcaaactctctcggattcaggacattcgtcaatgaaaaatagcctaaggaaagcctaagcaatactcgaaacaggcacagtgcaatgacgcatagaaaatgtactattctagaaaatcaaaataatacaaataaaaaggatcgaagttgaacgcaggataaacataaaccgtgaagttttatctccgaatcaagaaaccacaatcgttagggatgtgaaaatgtgtacctggaacacagcggaggtaggagacacgggagagaaggaggactggactccaccggaggaatcaacggcgagagcggcttgcacgagcttccgttggagatcgtaggtggaatcggcggaggcctcgatgtcgccggaatgttgcttggcgctccattcggcgccggatttgcgaacgacaaaggtgaagactcccatggttattggttactcaaagcgaaaccctaattggaaattgaagcctcacagagagcaaagttgcagtgcggcaatttgagttgaacgagtcgtttatgtaccagtcaggttttggaaccctaatgctgtgtacgtgaaaagtccatttagtccatccgaatatgatattttaataacttatatcagcgcgcatatttatgtgtaaatagaaaaaaaaaatatatatatatatatatgtatatataatttagtcagatacactatttaatattatattattatcgtaaaaatactatattattattcaattaaaaatatgatatataataagattattattttttataaaaaatattttaaaaattataattaagataatttttaattagttgaccgtacaaatttaatattgacggtacataaaacttatactaaaaaaaccaacatttttttaataaatttataaatgtattagtcatgtttaatattcatcagaaaactaaagtattgattaaagaaattaaaaatattgatttgaaataaaattttcctaccttaacgaagaacagcgaagaatattttaccttaaacaatcttatttttcgataacagattattttgtttctttttttatttgtgttgtttcctttttatttaattgactgctcatgcctataaaaaaataactcatcaacaattttttctgtgaaaactcttacttgaatttttcactctcaataacttaccacaatctcaaatattgacgatatcataaaaggccgtgaatatcacaatccgattgcttttcggtgcagttttatttttttcgaatccttaattctttttttcgaatccttaattcaagggggccacaaagtaacaaacaatcgttttctaacagacataaacaaaaattttcttttttagttacaaaaagatgcaagtttcatataacactgaatggtaagtggtagtggcaagtaggcttttggccttttactctgttctgttgttactttttgatggtcattttgcttaactcactacgagcaattttttatttcctaactgcatgtagtttccagtttagatacttcgttttggttttcactacagtacagaccatcatgttctttaagtcatcgtacattcatgacactgatctatggagccctaacaagtaacaacaccactacataggtacattaccctattaggccacgattttatttaaaaaataaaatgtgttctttcaaagtaaccattagaaaggtatgaggctgactaacatacaactataatttcctatgtagtttgtctaaacacggtgcgatccaacagttacgtaccgcactacactgcattaacatatacaaatttcacctaacccccaccataggaagagtaataattaaatagaggggggggaaagcctcaacaatgagatgctattttcttatccttttctgtttaaaataattggaagccatgccagactagttgcaatttagaacaaatagtgcacatccatgaatttccacgttcattgatatcgtcccctgcgttgttattacgtctgttccactccacacttccttacccttgcatgaagtgatgcttttgtcaggaagaaccttagccagatatgatgtctttgcatatatctccgtcttctgttcgcttagattgaagaaagcaagatagatttcccctgaatagagatataagattaatataaatgaattaatataggatttgactttgactcctcttagagggtgaagtggatgaaattatagtagttgattggacccttatttaagagtcagatggtactcgtgattaagcaaattctgttatttaagttcttatgtactcatgattatttaagcaattagcatttttccaattttgatgctttgcaattgcagaaaagaagaaaattcttgacatccatccaagtgtttgttagaaagtagagagagacctgtccttcctgttgcgatccaagagcgaatcccaccagaattaacattagctgcatgaatgaccaatttgctttatgagtgataaacacaaggaaatggggaaaaagaaaagcaaccctggaaactatttctaaaaagtggaaaatgattacaaaattttaccttcaacatactctacagttgcacaaagaccggagtaactatttaccatggtcccattggagttcagttcccagatctgtagaagaccggatagatcagcttccaacagaatcaataaaatacaaattggccaaggcaaatggtactcaataggggtaaaaataataatatgcacataacgaagttgttttaatgaatcacacacaggactccttcctaaagattaagggccacacgctactcttgtacatgacatatggactgcaacatacctgatttgaatcccatctgcatggagaaaatgtacctctcttgaactctctagaagtaacctttcgttttggagaagcatccaagcaaaatttcattctgtcagttgcaactaattgatgtttccctcgatagtctgcctgatacatactcaccccatctctgtaacaataccaatgtaacaatttctattgttaactgcaacacaaatatttaaatggaagttggataaatggaaaatagaaagataaagcatgattacaatctgaattgaagttctcttttgtgtacgcagaaagtggcctgatgcttgttttctaaaccatttttccaacagattatttcaagatcttggttaagactttcaatagaccaaccactcgcctttgattcactacagccagtcaaacccaatgaatgtctatatgatgcttttattcctttcttaggtcttccttttttccctccagggtgcttcaagttaatagagcttgtgacgtaaggaaactgtcattgcagtaaagtgaaatgattcatgataagttctatgcctcacgtgcctattattccctaaaaaattagatggctcacatgcctccatattgtttgagctgaagtaattaatctctagcacggtaggatttgtgataacttcatatgtggttggatcgatcttcctcacatcccccccatacataaggggagacttcgccaaagaccacaaagtcatctgccagataagaattgattcactcagagtctattatcataatgcacgtacgcagatcaaaatagatacatgaatatataggaaagcaactcagttatgcttcttcttttttttatcaatacctgtgtccttttttcttctagagtgagtttactaaacctgtgtggaccttcatttgatcctacagatagaatagggggataagaaataattccataatccatattccaataacatgaggattctggttcacacaaatgaataatagataaaagcagttactggatcaatacatacataaaagtaataaacaactcatgcacagtatgagggttatgacatattgacattcataatgggcaaatgaaaaagtagcagcttagtctcattacctggatcagttagccatccaaatggtagcatgtccaaatcaggccaggaatttccctttaaaccttttcctcctatcatattagctttagaaaaatccctggttcagaattaaatgaactaaagttatgtaatatggttatgacagaatgtatacagagaagtagcatgattgcaacatactgcaaggctgataaaaaaaaatcttaaaacagaaatatagacagcttaatcaccttgttacatcaaaatgagccttgacgtcctcccataaatcccagtcatctcctgttattctatacatgttgactagtccactggcatccttggccatggctggtgtcacactggttccgggagacagagaatacacaatagggcgattaagctcactgagaacctgtcatgacatgccatacgattagccaacaaatcattggaaaaatattaccaatctcagtgtttatgtgagaatgagaggtagtggagagggtaagagggagagggaactgcagaatacctcagacacatagcttatttcatttaaatccaagtcatcaccaaacacacagtcatgtttcactgcaaggacagaagaaaatctatcaacatagctgccaaagcatagccaaaatgatgatatatgtattctcatagatcataatgaaaatccagttaagagtccactaactaatttctattgtatttttttcctatgtcaacatcaacatcaacagcacctttaacccaagctaattggaatcggtggtagatgaacccaatgatagatacgaggaggttgaaaaaacaaaaatggtaaaagctaagaagggggaaaggaggaggggggagatgaagaggaaaaggactaaaaaggaaccatctagaacatagagataacaatgtttaaaaggccgacacaattttagaggtttagaatggatgaaaaaggaaattgcagtaaactaacttttacaagtgtggcccaatgaagtaggctgtgttgtttttatctttagtgaaaatcgaagttccttgatatgataacattacttgatatctattggaccactaaaatacgaattctgtctgcttagtctcttgatgaaaaaagcagtacaactgtttgagttattaaacttagattaagatagagcaagaaattatttaaattcatcatgattttcgtctgtgacatgatgcaagtcctgatagtgcataataagcagattataaattagttgaactggtaccaagatcaacaccccatgcagcatactgctcataaagggatttcagaaaagctctcccagctcccaacttcgtatttacactcatgaaaccgtgaggcatccatgcacaagccctttctggcattgctatgtcttttgcacgccacactcgaccagattcttgataagcacctccctaggaaattgcacgaggaggaaatcaaggtcaacaagaacttccaattaagataaaacaatattctcatattctgcctgccattttgtattttttttagagaaaaaaaatgtattatgtaaggcatccatcactacaaatttctaatacagaagtaaagaaaaataatcaagtcatagaagaaatgcaaacaacacctttgttgtatctagaataggggtgtttgcattgacagcttgtgtgcttatccctctcataacatgaatcccaaacttcaaacctaaactatgtactctattagctacttcactgaatcccttcccgcctgtggaagaaggccaccttcctgggtcagggagcatccttccccattcatcaatcacgtcaaatccaagagaatcaggataagcacccttgactttcttcctataccagaggtaatccaccacgacaaactacaagagttgatggaaagaaatcagtcaatatctaaccaaagcactgctaacacagttaaatcatccataagttattgttctttgcagtatctatacctgatatccatgagccttgagacgttgagaaactatttcagcactttgtaagaattcttcttcagaaattgtccagcaaaaggaatcataggaattccaacctcttggtgggaggctagcttgctgtaggccactctcagatatattttgagataacacactgaaatgacacactcagatatatattatgttatatctttctttacttttattgtctaatatgtgacgaataagattaaggaatactagttgcacttaggatatgattgaacaacataagatttcaatttaatatactttcaacttatattttctgcaattaatttggacataattgaagcttgcttgtaaggtttaaaagtcattccacacacactgctctagtggaagctagtttatattctatattaattcaaaatcacattcgaaatagtaaacattaatgttaaaacctatgctgagtttcaagtctacttctccaaattaactaattgaaattaaccagacttgggcttcctggatttgacatcgtggatctaagtcaaaagttgcattattatgttactgattttaaaggttgccatataggtatatgattaccatagacgatattcaatgcaagttttgcaaacagcttttgacatttagctaccaaatactatatttaaagcaatgcataaaaccagcttctgaaaatcacccagcaataccaaatccaccccaaatgtgagtgagctctataccttttcgtattcatataaattcaggaaataatgacaacagtgctttattattattaataaaaatattttctgttcgagaccaaatatgtaagtagatattttctttaagagtaagaatttacaatgactaaaaatgcaaaatcagagttgaattatccgagtatcattagactaatcaacaacagcagcagcacttcaactacatattcaatttaataattccaaaaggcagtggaaattttgaatactcggtaaatcactagtatttctgttcactcacaaggcagacttctgttcacacttcacagatccaccagagtaatgaaaccagtgtgaatcagtccatttgacaagctcaagcagcaagcaatggcaatgtgaatgaacaaaaaagcagaacactttatttataggctctggattctagcctccaatttattaaccagaaattagcaatcaagcatatcttaaaaaatatccaaaatgtagcattaaggactacacaagcgaaactcagaaccaacaaaacaatagcaagagaagcaaaagattccatggttgcatacctcagagaacagagagcaaggagaacccataaggaggataaggacactgagaaacccttcatcattgtgggcacgtctgttccaccaaacaacagttcccactcagttaaatactgataaaatctccaacttcgtagtacatcattatttataagttataataaattaaattcgaaataacaaatataatagaataaagtaatgataatgcgttgatgcgttgtgaaccatatatatgtgtgcatgatgcataattatcacatgacattgaaagcaacgtaataacggtgacgtttatctgtttcagacttttacttgaacacagtcgtggctttcttcgaagggatgcgcattttggttttgtcgcgaccttgtttagcccttgacacttgtttacgttactacgcgcatgatcccgattgcagaggagtaaacgtatctgccacctccaaaaattttgcaattcattccaaaattcggatttgtatgcatgttcgtgacgatcaacgaagaacggtttcggtgattaaaaaagtgcacgaaaatttgtagtttgaaatggaaattttggtatatggtaaagggagagaaaaaaaagaagagagaaaagaaaatggtaataaaaattgacgagttgaagaggggtcagtttcacacatgcgatgtgagaacatgatatcatgtgtggtttgctgtcgggcatgtgtctataaatttgcggggtggagcgcgtgggcgtagattcctccacacagacaaagatacagctaaagtaaaacacctttcctttggttttggttttgcctcttaatcttaatctttgtctattctagataatttcacaactcattaaatgctaaacattttataaattactactatatttatgtttgggtcttactcatgaagacattgatttaaatattaaaccaaaaaaatatttttgtgtaaatcataagaaaatataaaataaacataaataatacaatttttcatctttcaataaaaatacttttactttaatttttttaaccaatatctttaaaatacttgttagcatttacctttatgattatatatgataccgaagtcatagttaatccgtgttctaaccgtcgaagaaaaacttctctttcatttttttctttttagtttttcgcatgcaaagtatccttcttgaggaaaaaaaaagcgtctctcttaatatttgaatcgtgatttatcattttgtatggaattagcctcttcctatggacctaattaataataaaaactagtactctatacagtgttcattaaggagaatttactgtttatataaaatcacttttgataaagtttttctcaagacttgatcctgtgtgtcgaaccgaaatggtttccaacaactaatatgtactcacactaaaaaaagtaaaaaataaatctcctttcttaaaattattttatatttttcatctaaattattctcatataatttattatcttggtagagtgaggtgcgttgggtgttttttattttttttgaattttaaccaaaactttccgtctaatatataaaaatacatgagattctatatataggtgatgttttaaaaattggaacatgatcgttgctttttaaccaaaacttttctactaatacgaataaaaaaatgagattccgtatataggtgaagttttaaaattggaacatgatcattttaatgatatgttcacaaaatttaatcacgacgtattaggggtaactaatacgaataaaaaaatgagattctgtatataggtaaagttttaaaattggaacatgatcattttaacgatatgttaacaaaatttaattacaacttattaggggtgagcatggattgaattttttagaatccaatatgtatccaatttatatttatttaaatggattggattttaaatccatattcatatttttttaagaaaacaatttagatttaagattcaatctatttaaatggatatgcatttggatatattcaatttatatccacttaaatattatattacagattttagttattaaatgctaaaaagtgaaaacttagtacctgtccatttaagagttattttcaaccgatcttagttaagattatttttttgatcaatattgtgtatttttggcatacctcaaccaaagcaaattcgacagatatcggtccagacatttttagatctacgtcaaccaagactattttttggctaacattagtcagtacattttcagtcgacattgaccaatggtgtttttggtcgatcttaggtagggttactttttggttgaggtcggcaaagatttttagtcagtgcattttttggctgacattgactacagattttttatcaacatcgatagtgactaattttttgccaacattggttaagatttttgtaactaacattgataagatttttttttgctgatgtcaatcattaatattttttttgccaacattcgtcaggacttttttttggtcgacgttaactatatttttttgctgatgttggttaaaactatatttttgttggcaacaactaggatttgttggtcaatattaaccatgactatttcttttagttgacattagctagggatttttttgttgacatcaattaggatttttttgatcgacgacaattggagaaatattttggctgacgttaactagattttttcgtcgatgtttgtcgagtttttttttatcgacatcaagtaggtttttcgctcaacatcaacaaaaaaaccatagacgacgtcgagcgaaaatcctacttgatgtcgataaaaaatattcttgaccaacattaacaaaaaaaacctagcttacgtcggctaaaaaatagattcgactgatgttggcaaaaaaatagtctcaatcaatgtttactaaagaaaccttatcaacattaacgaaaaaatagcctcaacgatgacggcttaaaatcatcattagttgacgtcgacaaaaaaaaataatctcaatcaaagttggcaaaaaaatagatttgaaaatctaaataaatatccaatccatatccatttcatatctaattaattggattgaatttaaagtaaaaaaatgaatttggatatgaaactaatccatttaatgaatttaaaatagattagattgaattaaatataaattttttttatggataagagtttttttgtccaaccctacgacatatgacgtgatagagtctcatccaaccaccgtttcattgtattcgttggattttttcttggtagattgagaaaaataggaactgaatcagtcacctaacataaaaaaaaaaaataaaaaaatgcatgtagtagctggggaaaggaacagaccaatgctatatatagcttaaaccgagttaattttggcacgaagcggtttacattacatatggttcatttgctctcctaatcaatctacttctcgtaatgaaaaaaaattgcgcaattttcttcatataaacaagcggggaaatgttacgcgttctatgcaaacttaaagatgaaaaacttccgcaaagatagttacaaacttacagttaaatctcatttcttgcatgccgttatctacgcagggtcaatggccgaaattaagagggggccgttctgcattttcacccaaggtactgcgaacaatgtgctccaacctgaaagcatcacattgagaactgcctaatgagttgcttataaaaattaaaaataaacaattagtatatatatgattttaagttgcttaaaagtaaagagaattgctttaagaagcaactattgttgatagttatttaactatattaaatataagagagagaaaaaaaatatttgtgaattaaataacttgttaatataaaattttattcatttttttaacttttaaggaaccgcttttatattcaaagtgcaaaattagtagtagggaattgctattgacactatcactctgtgtgtcttttaacaatatttccaaaatgtccttttgacatagacataaaagaattgtgattttgtaataaaaaattatacttatatgacagaattgcatttttatcgtgtaattttttcaccctcatgtaggccatggatgactgtgtaatttattttcacccacaaataataccacgaaaagggttccgtttgaggagatggtggcacagtgaggccaatatgtcacacagtaaggtggtggcacgcaggcttagtgtggtggtgatgggttgagtggggtgaaaagaaggtgaagggacagagagagggataagaaagttttttctcacgtttgtagggatcaataacaaatgagattggaatcaataacaagtccgtttggttaattggttaagcatttattgtcattgaatccacacgttaatcaacttgaagtaatattttgttactcgtgttatcttcatattttgttgaattgaataatttctgcatataatattaacaactatttattttatttttgatagaacaactatttattttattagtaaccaaaatttcaagttaaatatcaatttttgtcgttaaaaacatgaaacattgaatcatttaaaaatagaaaaaataaatttagttcttgaatatgtaaaatttatgacaaattaatcaaacaaacaatttaatgataattaaattcctaaattttataacttaatactaaattagtccttaaaaaatataacttattatcaatttggttcataaaattattacactttttcatatttgataactaaatttaaaattttcattatatcaatatgtcatccttacatttttattagtaaaaaaataagtattctttttctttattttatcttttaaaatgagatgttctcattaaacaaatccaaattttctaaagtgtatttttttataaaaaaaaagattgaaattacttggagggaagttactcttatgaaaataaaatacaattttttaaagtgtttttagtatgattttctcatcaaaatttaagtgataattttttgtcacgcgtataatatcaatattaattggaaaataatacgcaagaaattattttgttgcattgttatttactcaaaataaaatggattttggggaaagttcgactcacttcatctacatcaaaataatatattaatgttttgccgatggcgccattcaccaccgccacaccgcccaccgccaccgccagcaccttcctcctcgtacttgatgtctttcactcacctgtctcactctataattcgttctctttcctcgcatttccatctattctgcaacaaaaatgagaaactgcactgagcaggcattgggactcgccatttctttcttccttttactcatcctcttaaccccgtccattcctcagcctcagagataccatgatttcgctgacaagcgcgaattctttggtaattccttacgaaaaactacttgttagcctttcatttccagtaaagtaaccttaaaaatgtaaacttggttatgtagaggagtttatgtcaactgagcagatgagggtcttccatttccattcagtttgttggcaaattttgaaaagtaaaaacaaacagaaggatttctttttccgaatttaaatagaatacattacactgagtgaacaaacttataaggatttctaataataaactttcgtataatgtaatattgttaaatttaaaagagttcaatttctatttaaatttaatccatcaactaattagaaattatggttagcatgagtatgaaattaatatacttaatgtaaaaacggacaaacttttcatataatataatgttgtttgtatttgtgattagttgccagtttcaaaaatctttcacgtgaaaatcttttatgacatcattgtaagttcacaatgtaaaaatctttgcgataatagaatattaaaattattatttgtttcctcttttttattgttcttcaggcattcccaatgcacctaacgtgatatcaaatttcccattcatggttattggtctcattggccttgtgctttgccaccgtaggaactattttaatatcaggtattttcattttgtcaccatcggtttctttagcttacgtgattgttgttgtcaattatataattaagatatgtagcatcagtttgcaaggtgaactatggggttggacatgcttctatgttgctgtgacttcagttgcttttgggtcttcatactatcatcttggcccagatgatgcaggccttgtgtgggacaggttgccggtgagtttctcctatagaagttgaattcaattcagccattgttgctgtagaaatctatattcttccatttcatagttttgattccttgattattgtttgttattggagatgtctgctgctttcgcgtctctgttggcaatcctcatcattgaaaggattgatacaaagaagggaacaatttcaattgtacctctaattatggcaggcataatgagcaatgtgtattggaggcaagcctacttcttcattccttctatttgcatgagtttttttttccccttaccctattgcattagttggatatttattcattgatacatacatgcagtccttctataagtgaacaaaattgctcttcatacggataaaaagttggacaaaacttagttccagttctttagatgcttttagggctgttctttaatcaaagttggagtttcatcacgtcaacatttgttgtgtgagttctgtagttgatactccaattttaatgtgaaaataacagtaaaagcatcaccaaactgcatctaactattctaaaaaattgtcaattctataaatgcagttatcataaagatataggatttattgtgagtggaaacatcttggattgattaagataatgtcaaaattaggctagttcttaacccttcggtaactgagcatccagtttactgaacttttgctcttgagaatagttgctacttttctcacttattcatttatagtgaaggttctttggtgacatccgtttatatgttctggcccaaagtgcatcatgcattgccatacctctcatggctactttattgcctcctatgtacacgcattcaacatattggctctgggcttcaggtttgtacttttggtattataatagctttttctatgtaatgtagatagtattttcaattaccctgaatttcaattttaaatcttgacaggattttatcttctagctatgctgcaagaggctgccgatagagtgatttatatactgacttttcacattgtcagtggtcacacacttaagcatttgtctgctgcaatggttcctgtcatcctaacagtcatgcttgcaaagagaagagtttactcggagaagcttttgcatgtacgcaatactcagctccatccaatacagatttgaattataagaaagatttgggactaaaatttcagtgaaaagagtgttgacattgtcaacacaaaatgagttaggatcaccgtccaggttatggatattttatgaatggtttccctttctcatcaaaactctttgctgtcattcatatatggatcccaaaccattataaaaaataaaaaaacggaatttgggaatgttttttgaatttattacctgattttctaaaactatctaggaggttttttgcacttgaaataatttcaatccaactttcttgaggcaagatgctacatttctacaatttttgttggtaaagcattctgtatttgtttcctttacccaactaaaatttagcactatttggatatcatgatatcatttgagttattacttaataatggaaactatgtatttattgttgttgttatttccacctctcctccttttgcaaaagatgattttcatttacgtcttcctataagggctagaatcttaatctgacgtggttgatgtggtctgtatgcaggcaaagtctacttaacacgtaaagcatttcccggactatgatcaaagaaggcatttgagttgtggagtgatctaagcaatgtcatcctttctctcccactgaagaaaaagtagaaaggttaagttgccaagggaagtttagtgatgtatcatggagcataaggagtttgttaaatattttatgtttataaacttttgtgctttagttgtactaaaaacgaaaagaaggtaggtggatggagcaaatcactccctaccaattgtgatacagtaacattcaccttaattagcatcttgtttgtacggtcctgtcctgatcttcaatttatagccagtattaaaatagaagaggtagtccaagtagatgaagaatggaatcttgactcgttcagccactgttctttgatttgtatggaagaacctttggcacctgcaaaatatttaagaatacaaattataacttaattatttaaaaactagtgatacagtaactaaaataagattcaaccgtaggtaccaacggagtctaactggtttaacagggtatatgagtgtgttgtgatactgttttgattcctattgaccaaaataaagactcaacggtaggttggcagcattcccatataataacggctacgaacctcacagtcgagtgtaaaatgctctacatttggttggtaattattaatatttgcactgatttttttagcttggcatcttcaaactaaacgaataagcacggtagggaaaacctgacttgcagtggaagcagctgtaaaaaggccactcttctctaactaactacatatttctagggattaaaaaagcacagagtttaaattaaaggggccaaatttatacaaaaagcaaaaaaaaaacaaagtacttggaaacggccaaatgtgcacatggttggaaactaagattcagcaaaatagtcgttttcacttttgatgattgatgcaacagaagcaaccaacggtggcattgataaacaactggtgggaaatcaaactgctgaaggaagttgcattccactacatcttaagtaaaaggtcgcatgtctctaacaaaggttcacactagaaatacaaatacgtccgtcgcgtcgtgtgattctctttgaaggaaatggtcccatgatgccactttcaaaggctatatctgctctgtttgttccttttgcacagattacatatgtttcaacgttaggacaaattatccacatgaccctttaccgtgcatgcttcatctcattaacagattctgatatcagtatatatttggaaagaaatttggagtattataacacatctttggaatatctataggtgcatgcccgataaaattaagtaggaaatcgaatccactgctatacaaagtctcccagtgtatcctaaataagtaaagaataatcgtgttcatagattaaatgcttcactttgactgagatgactggttcacatacatttactgttaagattatatcctgcaagttagagaatcctattggagtttggacgtacagtagtaattgatgccattcatataaaccacgaaattagaataaaccatttggcagttggcaccatcaagtaaatgaaatgttgtttctgaaacttggttttaattttttagtggaaacagtaagtaataaaggaagatgattacatctaaaacaaggtaatctgctacatgattccctacaaaggtgatcttttgcactaattttatatcaattttgctaaccattgcccttttcaaaggataatgattttgaaattataaatgaattttttttattaaaaaatgtagcatttaatattatatcattcatactgactagtagctggaacaaacaagaacaagaacagccaaagagaaaaatagactttatattcacttaaatttgataattgttatgtacttgagatgctatcagtgcattgcctgcatgttttgtgtggtttttattgctcagcctacactacaccttgcaggcatgcaccaatattcaaacaggagtgaaagttcacgtccaaaaatagatcatttgagccaactatggctatattatctatacaggaagaaactgaaccactgtaataaagttaactttctcttagaagtcttctacttcaagcataacaacctaccttaaaatgacacagtaccatattacaatgatcctctgccattaacgttactctcaacagctatactaataatatcaacatctcatattagccgttttcccactgttttcatagttagatttgcttgcaactaacatcctccatcagagtatcatccaaggcaggcaatgagaatgacctggatcttacccggaccttgctggcacgggatgattcggtggccgagggtagcaacatgcgaggtggcgggttattccctctgcgctctgcaatggagagggaagttcctttgcgcggcaaactggactttgctcctaccaaggtgtgattagccagaaatgcctcaccttctttcttaactaaggagcgactctctgaggaagatgcgtctttcacatgaacgggttcagtcgatgaaggagaaaatgtaaaggaacttgcataatccgaactggtgggagacagtgttggcgacttggaactgaatttggggctgctcctcagaaaacaagcaaaagaatccgatgctcgatgatgaggcgatggtggcggcattgatgaaccaacaacactagggacaacaaactgatccctgacttgaacattatcctttaccctctccgagccattatctacaaaacactcaaaggaaccccgcgagccacccacattgttcgaagaaggtggaaaaggatcaacattcttatgttgattcccctcttcaatgatgttcacactagattcacagcacttagaggatgtgaacaagcctttcatgataccactagcaagcttccttgtcaatctcccccacccattttctctagcgggaaggcaattttctgatccagcattagacaaagaaaaaggtggaacaaccccaccagcaagcgccttatgaaaaatcccataatccaaatcatactcctcaactctcctgggacgaatccccacatcaatctccattctctccacctctccattctccaccaccacttccttggtagaaagagcaatccaaaactccttcggctcttcatcctcaaccacactaacaatctcccccgttgctctctcataccgaacaacctgagaagccgctgatctagcattgcaacacattgcggagccacaatccttcccaatccacacgtatatagcagagggcacgtgcacaacaaacgcgccacgcgaatcaagcgcgcgtggggaaggatgatcaaccaacttagggacaagatgaagagggtcgtaaggagaatgaggagccatcctatacatcctgagaacagaactgggactagaaggcatagcgtgcacccgcttctgacactgcaacagctggcacgcgaagcccatgttggggttcgtgacgccacgcgcgttcttgacgtagtggaacgcgtcctcgaagctctggccttccctccacatgagatacgcgattaccagagaagtcgaccgcgagacgccctggcagcagtggacgaacatgcgcccgccctgttggcggacatcctcaaagtaatcgaatacgtcgtagagaatgctggtgatatcctccgagggtgagtccctcagccagagcgttttgtagacgaagtcggttttgaaatactcggggcacacgaacccgacgcaattcagcacgtgcgtgatcccgtgccgccgcagaagctcgtggctcttcgccaccgtgtcactccccaggtacacgtgctccgcgattctcgagcattccttgtcgtagaacgcatggtagtctttcttgaattgaaatactttacccgaacccgaatctggcgttatggtggaacctcttggggtcggtggaagagaccaatcgccgagatcgtcgcagccggcgctcggccactccaaaaagctgcgtttgttgatggcgagaggcttaagcggacgcggcggtttccgggtaaccggagaccggtcggtccaggaaattgatagggaatgtgttgctctacggtgaccgccgccgcggtcgttgttgttgttgttactctcttctcctaacatggataatcgacaagattcgaactttttaattgggtttcaaacccattaacagaagtaataatgggttgaaagcaaaagcttggaacggtaaaaaaaaaatggttacggtatggtattggtaggtgttgtgttgcggctaggttcgagttttttctcacctaaaaccattgacggtgacccacttctgactcgttcttgttataaagagaggagaattcacacaaaggcacttaaagtttggatcttgaagagagaagagagaaagcggtggggtatgtgtgtaaaacagaagaggcagagggaagtgaagaagagtttggagtttgccgagaaatggaaataaaagtggggctgggtggtcatggtcattcagtttgacctagacataatgcgtcaaagtgccacctcagttttggaacttttttcttaaatataataataaatactgtgcctctttaaaactgcatttactatcacatattttaatttatttttaattgtctttcttcctcccctattaattatatcatcagttttaataatatttatataaggtgcaattgtaatgtgcattaaaaaactagtgaaggaaattctacccaatttaattttcgttatatttttatcgtagatgaatcaaattataacagcataattttttataattattatattattttataattaaataatatatttttaaaatttaccatttaattagattaatttttatatacatattatgtttgcaaaatgtcacatgaatctaaaataattgaatacctcatttatatagattaacgacaaatagtaatataaattttaaaatatattaaaatattaattattttattattttattattattcaattttaatagaatttgatacatgatcttaataatatataaatacaattcaataatttaatgaataaaaatatttttatatcaaattataaaagtgatcagaacataaatataattatatctctccatatttttatttatatatatttgatcattacctgtgtttttaaacggttttaatattcttgatttttttccatctctagtagtcaaactgttataatagttctttattattaaatgttacaatgaaaaaatgtttgaccagacaaataattgtttgttctagaatatggatttgaattgattttattatcatctgaaaaattctttttatactaacaacattaaaacatcattaaaagagttcatatttttttagtcaaaattttgtaatatttcaatatataatgggagtatatttttttgtactcaaatttggtcaacggatttcttatgtgatttcttaagttttttttttgtttgaccgggggtttcttatagttatacaacattttttaactgaaattttatggtcagagcaaataaagtgaattttttataaatatgttgtttatataaaaaaaattattccttcatgatattttaataaaaaaaagagtgagaaaaaataattaaaaaatcaatcaactcattgtctaaaataaaactaaaatacggtaaactcataattaaaaaataaaaaaaaatcacaaaatcacatttattcatggtaaagtcacaaaaaaaaaatcacaaaattaaactcactttcattgcaatgatgaacttggtgatgatttattctaaaaaaaactctaatgttggagactcaaatacattgatgacaaatcaaacttgatctacacttgtaaaatcacaacaacaaaaataaaaaattaaactcattttttacaatatgatacttgatggtgatcaatgctagagaaacttaaacttgtaaagagatgtttaagagacttgaacacactaatattattaaacctaatctacattagaaatttgaatttcttaaaaaacggataaagatgctgagttgaaaacaagttgaatctatcttgatcatagatgtgaccaagagaaatggttaaactcaaaagccttttaaaacaaacaaatgtattgaagtaaaagcataatggagagaagcaattttgcctaataccattttgagtgaaaaagaaagtaagagataacattttgaaaaagggcttaaagtgaatatggaaaaagaataagggaacattatgagaagcaagctaacatatgggacttaaacctttttaagtctcccacgacgggaaacataagtggtccgtaggataggatttttatctgagataagtgtagttccaccatagatttgcctatactagattatctttttctttatttaaaaaaaaaaacatcccatcttctagtcttcctcttattgtctctgtttcttctcctcattgccatcgttgcattcctcctccatcgtcgtcgccacattcactcttctccctttgtcgctgatgacaaggccttaagattggacaaccttttcctgctcccgatgactcacccaaccaccactgacaatgacttttgcaatgacggtgacaaagttcttcccttaacaacctctctcccgtcgttcctttccttttcctcccctcaagcaaccaccactgctagtgatgccactgcacacatctcactgacaaagacttttgtcatcatagacatacttcgctgtcatttataccgtcgtgaaactgacgctttgatagtggctatccgaattcgcaccaccaatctctctctgtcagagttgcttccttaacagttcaacccataattgatctacaaatcgaacactcacatgaacatatatgagaaaacatacatcaacaacaactagatctggggaaaaaaaaacccacacatgtataatggttggaggaggacaatggaggttaatccagactttgcaagttgttgtcgaggatatagaagccattgtagaaccaaactacgacgatgccggaaatgaagagtgtgacaaagccgatgagaagaagcgcaacgatgtcgacagggaataggagatagatcggacctgcaactaaaagggatgtctttttttttaaaaaaaaaaaatctggtgcgtacaggcctattgtagtccaacacttatcccaagaaatacaaactttccatgactacaattttttttttccatcgtatgaaacttaattggctctcccacaataaactactttgatgttatgaaatgaacatgaatgtgaaaatttgatgggaaaacgtaaagaagctaaacatgaaataaacgttttagcaaaattatcattgtgcacaatttaacataatttaggaaaagttactgttgaaactcctagctaaaaataatatgaatattttttgtaacaaaattacagttgcgattgaatttgtgagttctggtgagtgtataatttgtgcttcaaattacattcaactcacaattcttttcaagccaatattatttggtgtagttattcttctgaagttacattttattggttctctataagttaattttaattcttgctatattgttgttctcaaattacaactgtttattgttgtaggcagaaagaaaaacataagattagaggataatgtcactgttatatgttatttattctttaaatgaccgtaagaaatttaaatttaagcatgcttgacaattattaaaagatgaattgaaaaggacatttgaaataacgaaaagttcttcaaaaagagcaacggttttttcttctagggcatacataccaccttctagcctaaaaacaccaacaagttttgaaaatgacccaacatcaccattggttcatccattgttgtcaaagtcgagtattaactcgtaaatttcatccaaattgacatatgcaaatggagttaaattgattgtggaaacgttttttatgaactcaaataaactcacgtagaattgctcaaaatcatgagtcatctccaagttggtgagttcaccctgcactccattaattttagagtgttgtggttcttcgtctcctccaggaatcatcttgtcgcgacaaaaaacacgttttgctacaaaaaatgcaataaatcatgaagtgacatgtttattaattgtaagcattacaacatgttcgtatagttttttttggtatccattgtcgttcttttcttatgcccttgttttttttatcgtgcacattgcaacacatcacatttatactttcttaaatttcaattgacattatggtacatgttttccttctatatgccatgaaagtggtttttatcccacttttaattttctttaccattcttacatatcactcattcaattttgaattttttttatttacaatgttaggatatttctcaaattttcaacaattggaggaacattgctttcttgtttatatctttcaattgttacaatctattatttttggaggaccaatatcatatttaacccataattaaataaagaacattgcacgcataaaaaaacaaattaactgcaaccaaaaattgatttccactgtgtattacgtcttgaatatacaacgaaagcttgtttcggttttgtattacgactagttttcgttatgatttttagccatttagggttcattcgggaaaataatttaattaagatttatttccaacaagtttttattatataaaagcttgttataagaacttaaaattaaacaatgatgctaaccaatattttttgaaacgatctggtgactacaggtgccagaaaggatcaaaatgcatatttggatagtgtcaaggaacttgcttttaactaatgtatgtccagagatctcgaaggcatatatgggagatactgaggtgtgcccaatgtgttttggcactctggaaacaatcattcatcttatgagggttgagggatattgcctaaaaacattcttagtagttaactacttaaatactaatatctcaatatatggttattttttaaaaataaattaatttagttaataatattaaatttattagtaatttatatagtatgttttaaaattattcttaaaattgttgaattttctctttctttatatttaattattttttacccaattgattaatatgtattagtctttttctcccattttaaaaaaagaaaatatatttatctttttaattcatatcatttaagtaattaaggttattttttaaaaaaataattaatacaaaatacaacatttagcaaaacgagtcctcctaagagagataaacaaaattgaaaaaaatcctagagacaaaatagcattaaaatgaagacaaaactaaaaagaaaataaaaaattctcttccctcccatcccctccggttccctccggttgcagtcggagcgagaagagaatagggaaaacaaacaaccaccattgtcaccactcacgcgcgcacgcaccatgcagtaggtgtggtgtgcctctttataactttagttactgcgttcataactctcaacgtgcaatgaatgaaggaatgcattgcataatattattaaaggcagcattgtaggtgaaggtgaatgaataaggatttgggcgattgctggtgctatgcctttggattttgattgatatgtatcagagcagcattggcgcacaccgcctcgcataccgctctcagatatcgaacctggtcaaagccggtctcatcaaccaagccatccacctgttcgaccaaatgaccgaatcaaattgccgcgtcttcagcgtcgactacaaccgcttcattggcgtcctcctccgccactcccgcctccacctcgcccaccactactaccgccgccacgtcatcccccgcggcttctccctcctgcccttcacctactcccgtttcatctccgccctctgctccgcccccgacaacattaacctccccctcatccacagcctcctcctcgacatggacgctctcggcttcgtccccgacatttgggccttcaacacttacctcaacctcttatgccgccaaaatcgcttagaaaccgccctcgaactcttccactccatgtcctccaagggaagagaccccgacgtcgtttcctacacgattattatcgacgcgctatgcaaagctaaacgctttgacgaggctgctagggtttggcgtcgtttaattgacagagggttgagccctgattataaagcctgtgttgctcttgttgtcgggttgtgcggtggggcgcgcgttgatttggcttatgagctcgctgttggtgtgatcaagggtggggtgaaggttaatagcttagtttacaatgctttgattgatgggttttgtaggatggggagggttgacaaggccatgaagatcaaggcgtttatgagccggaatgggtgtgtgccggatttggttacttataacatactgttgaattactgttgtgatgaggggatggtggatgaggccgtgaggttggtggagaccatggagagtagtggggtggagccggatttgtatagctataatgagctgttgaagggtttttgcaaggcaaatatggtggatagggcttatttgatgatggtggagaggatgcagaccaaagggatgtgtgatgttgtttcgtataatactgtgatcacggggttctgtaaggctcgccggactaggaggggttatgagttgttcgaggagatgtatgggaaggggattaggccagacatggtgacgtttaatgtacttatagatgcgtttcttagggaaggaagtacccatgtggttaagaagctgcttgatgaaatgacaaggatgcatgttcttcccgatcgcatattctatacggcagtagttgatcatctgtgcaagaatgggaaggttgatgtggctcatagtgtttttcatgacatggttgagaatggggtaaatccggatgtcatctcttacaatgcacttgtaaatgggttttgtaaggcttctagagttatggatgccatgcgcctatttgatgaactgcagagcaaaggtttgtaccctgatgaggtaacttacaagttgatagttggagggcttataaggggaaaaaagatttcactggcctgtagggtctgggatcagatgatggagagaggctttacacttgacagacatctctctgagactctagtcaatgccattcaatcaagtgatggcacaacatgacagtagtttgtgttttgatccactcaaattcatcacacctttctttcaaatgggaaacctgacttaaaaagttttttctggatacaatacaccaaggcttagcaaacctgacctgacctgaaacgttatctgcaggtaatggcgcctgtaaattggtttatcctatttttatgacgctcgtggtgccatcccatacctttatgtgtctctatgctcctatatacttatgtgctgtataacatactaattcacaggccagcttcttgtaaaggatccatacagaggactgtgctctaatggtttcttgctaccaatgaagtaacggtatccaagttttgtttcataatgtcaacagagtgaacagactatgcacttggcagattgtatatgtcaatacaatagaacattcatttacttttggcgattgttatacattgagagctatggatttgtttctcacccagcacaactaatttcagtaattgatgatttggttggaatcactccagctgcctattcaaatcccaattgttgtttcttaagagttcatattgagggtggctttgagttagtcttatgctgtcttcatactatttgagtaaatctttgaccagtggcagctcaattcagatggattcatgtcctgccttgcatagcagaaaatcaatgaatattttatggttctaactatcaataatagtatagcacccttcttgggttaacaactccttgatgttggtagaatgttgtcttgtttcatcaagatgaagtttgtggttgcagagcatagtttgaactatgaagatatggtttcattggtgatctcaccttggtgtggcttatgcctagtgccttgctatatcctagcaaattgttgaacaataaactctggaacctttattaacagatcatcggtttactatttgtgtctatatctagacatgtaactcagtggagagttgtggatgtgaaaaaaagattcactaggtagccttgttaggtttcaagattcagatttattagtttctgaaaaactgtgatgctggcacaagttatgttttccttctgagatttggattagcatgcaagaatacatatttgtaggattatactgttacaaaattcaacttgcctgacctttattaacattattttctggtaaattatgatgcttctgcctgtatctgcagcttggaacctcaagcttttccaaagaaatgtcaccatgatcattacacattgatttatccgaagtatgtttctactccttaaatttcagcgcgttcttttattagagaactatgacatataatatgattttgtccacttttgctaacccctatatgaaagaaaacaaacaatataatgtaagaaaaaaaatggatgcatgaatcatttaaatgttgcatagtgtttctgaaggctgctgaatcaatggagactgactggaaactgccttatcttatgttacttaataaattttcacttttgttggtgggatagtttatagtgcatttatgcaggagaatcttatattaaaacaacactttccgtagttgttacatttagtttgatagtgccacagtgatgtgtattctctgcagttgtgctgaacctaaggagtcagaacatggtttcacgcaactttgattatatgtattgttttgcatggtatcaatccccatgtctatgaaataaaataagttccttagtcttttttttttatataatgatattaatgtaccctggttcattgtatgctggtatttccttgccaatagattctacccaagataatgttgcaccttggaacaggactagctgaaggacaactacaaccagcacaactagcaatttgcagattggtttgatggaaaattggagaagaaatagaaagaacaaaggagggcaaagagaatgtacagatgaaggacatacgcctggattcttgatgatttacaaatagaaatgaatcatctagggtccaccatccaagcaacttccggagtatgaaattaaaaatggaaatagttaagaaaatgccatggtggtggctaaatgtcagcaaatgagacgtgtattaggaaactagtttcaaaactgctacattttagaattagtttggaaagtacagtattgaaactgggttgacaaatcctttcttcattcactcactcactctcttcaattgtgtttctcaaagattttcatttcaataacaaatctttctctaacatgtggtatctcaagttctttattcacacatattacaccaattttagaaactcttaacctagttttattgagaatccacttctaatataatcccaggtcatcaaaatgaaactggatttcaacttgcctgaatataggattttagaagaagaaatggatttttccctccggttttgaacatcattagaccaggaataaccattggcagccttatcttgcatttgcaagaggcttattccacaagttgaacttgtgattaatatttacattctgtgctagtggcgtaaacactaacaacctattaaattattaatatcctgttcaattgaaaacttctacttgcataagttttttactgtcttgggtagcctttttctcttttgaactaggttatccgatgtaagaatggaggagttagaatgctaattattgacatttgatcatgaaatcttagtagtttatgggtttggctgatcacattacttacatctgttttggggtgaggtggagtaaatggaagtgttgaaaagaaacaaaatggagaaaagcaattgctaaaccgtggcctgtctgcatctggggactgttaacaatacatctgaccagatcttggaaaatatagaaaatttgaaggcaacaaaagaccctggctttaatttttctatttgacttagaattctaagaataacatccatctccattccaaaattgaagagaaaatttcttccaactattgaattgaggcatttactaccgtgacatgagcctggggaattgatgttagccacatgaatcagaaacttttgtgtggttgttttgtagctattgcattattttccctttgaactttggttctttttttttttttttgagagagagtgccgtggggctgctgtttgactgatctgttgaaaattatagcttccttcagttgctggaaaagttaaaaaaatgctcaaccgcctgaagttcatcaatgtaatttaagctgccaccgataaatgagtgttatattatgggcatatatacctttaatttttgccaattttgaaatggtttcatatacttgtctcttttttatgaaatgagtatgttaaggctgctcttatatttaacacattgctttatttatttaagctgaaaatattgatttctttttaaattgatcgaatgttgactcctaagtcataacgagttcctctcttcaatcggctgttcttaacttttttaagtgtgctagaattcgcagtctgtgtttgtggtccacgtattttggaccaaagtaggggaaaggtatcttccgcagtcttgtttgtgtgaatgtaaattgtggtacaagaaactgaaagcgctttagactttagttagaatgtatgttttccccttgcatgatcaggtcttttccctaacctttacaattttcatagtccaagaatccatgccgcctgtaaattcacacaaggtcttgttctctaatgtggattcaaattctctatatcataggacaataataagctcggcaactcaagtctaaatttcacacatccactccaaggcttgagctaatcatagcatccataagtgatacatgatatcactttctgtttgaaaaactcaaatcgggtgttaaatatctaaaataaagaattgaaacattttgccccacataagtggcttatgtttgattctttgcctttatatgaatcatccttgaagttcccatgaagtcattctcattcccttaatgtgctttaatttttgttttaggcttgatttgtgctcgtttccattagcttaataatattctcgtatcactgcctttctgtttctcttcattttcctcatacatttttgcacaaccacaccatgtctcatcgagaaaccaaccctcatttttctagatcatcacaacctgaatatatagataatcgtgatacagaaccttatccacttgtgccacgccgaaaacgccgagaccaaccatccacacaagtagctccacctataccagttgcattgccacctgagcatgaagatcgtgttccattacgaacacgacctcagcatgaagaccatgttccattgcaacctggggtagaagatcatccacacccaccaccacctattctccaagagcctcgccgtggcaagcaaagaagtccacgtagacagaatcaaggtttcttgccagttaagtcaaaggtaaattttcaagaaccacctccctcggctgatgtccagccaccgctgaaccgtcgccccgagcattggcaccagccacgccacgatccccgcctcagtggtataaagttgcccaaggagcaaaagtctcaacccttgacatggttaggtgcttgcttgtgtgtgatattttggctcatcataatcataggaggcttaatagtccttatagtgtacttcgtatttcgcccccaaagtcctcattttgatgtgtctagtgtgaccttaaatgctgcataccttgaccttggatatctactcaatgctgatctaaccatgctggctaacttcacaaatccaaacaagaaggtgcatgtggacttcagctcagtgataatttatctctactatggaagtacccttattgccactcaatatgttgagcctttctatgctgcaaggcttcaatcaaggtttgcatatatccacatggtctctagtcaagttcagctgccattaagagagagccagaggcttgtgaaacaaatggaaggcaatggcgttatccttgaagtgaggggagttttcagggcaaggtccaaattgggaagcatcttaaggtattcatataatctttatggccgttgcagtgtcatgctaacacgccctcctgatggtattttgctcaaaaagaaatgcagaacaaagcgctgaagcaataatttagcaccacagatgatgattctatatgtcattggtattctttttttagtccttgaaaattggggggttttggtctttcttaatttgcctattcctcctgaaaaataacatctttgaaggctagcctcttttttccctccccaccacatgtagttttgttaaaccacaaatttgtatcttattttttttcttctcgagaattattagagattatttattataaattagtaacagcttctttaacattagttcatactatattaagtagtagaagtttcttaagggtgtgtggctttttaagttttcacgccaagtatgatcgatgttcaatggccaataaatatcgcgcttttttatcttatatcccacaaggcacagaccagctggtccaagatttgtcctaaaaagtgaaatgcttatacgttacattttatcgtaccaaattgcacagcgaaaaattataacatatgctccaagtttaattaatgctccaccatcatgactccgccactgttgtaagttcactgcatgctttagcgtttttaatttcacatttaggatatgatttttaaaaattaataattataactttcacgtctcaaatgcgattcttttattctcaacatgtttccaaacatgttaatctatgcatacatgagcaacaacatctttggtgttgcgctaggacttgagatggctcatcaaatatgtttagaacattactaccagtttaaaaagattgttccaattaacatgacatattaattgttaacatttgctcataaaaaaaaaattgtttcaacaatgtctacacctaaaaagcaaaataaaaacaacatatcttgccattaaacaaacatatgtcgacaagattacaagacatgatttttcttagtcacaccactaatttagttttgtcctacttaggtccaattttagttaaacccgtatatttccatacttcttcaaatctaatgtcgtgaaagttcaagactaagtgaagatctaacccggttgaggaacacccccttaatatgcagtctcttttaggatatttgttctacaccttcctttgcaaaataaaatgtcaggatctaatcggtacagaagcaaaataaaggtaaaaaagaatcataattaattttattagtaaaattgtattgaatatatttgataataaaacaaaaagagggacgattgaatgtcgtccaacgacgttgaaaccgctatagtttctagagatttgacatgttgagtggttgtccagcccacttgttccacctgttccaatatagacttgctagggagacattgacgaatacatagatcccccaaaaaccaatttgttcaatggaagaaacgtccatacagaagccgacaatgctgtaactcgattgacaaatagggcaccgacccataaaaatgcactatattgagcagatacagaaaccagggttacgcttactgtaatgtaatgacagtgtatttgtttattgctttcatgaaatgttcgttcaaaacaaccaaagtacaatagctagctactcaagccggaagcaggtgcaacatcataatgcagggaaacggctcatctgaattgagaaaacctctaaagtgaataagtgaagatgcatgttatgttaattaaaattaaagtgtttgatgaacttaacttattttaattcaagcgtgaacacaccctcacttgtatacttcagacttcagagactttctcactttacagtagcctaatgctcaaccagtgaccaccatgacggcattctaagagatggtggaacatgttgatggtataaactacaactttgtaacattaatttgaagaaatcaacataaatacacaaaaaaagagagaaaagaataaggcccaattataatagaggttcggaaagttccatttcgttagaagcctcctgttgtgtatcgggacgctgctgaaatccaacaaagtccatgccgagccactgccatggccaacacacatatctaggtcgattactgctccttgaatcttccctgttttcaaactcttcgagctgatgagtaagctcctctactctgtctcttagtctagatgacctcaagtctgctaacttaagagacttttctgctgcatctctggctgccatggcagcagcagctgtttcttctttgaaatttagtttcttctctgattctaacatggattgctttgcctcttcaaattcctgcttaagtgctgacaactgcagatttgcagacagcaattatcactaggaaaattcgatgaaaaaatacaatagcattgaaaaaaaaatccaccaacaggtggctttctatgatatcaacttgcttagttacagcaattttttttttagagtgagatgataatgttagagagccaagggattgcagtaacggaattcatggaaaaaggatgtcattagtagtagatataaaataaaaccagctttcaactaaaaacgtagaagctgtttggtttgagaaatcagaaaacaaagtgaaaataaggtaacattcttataattaaaagtaaaaagcagaaaacattttcccaaaccaaactgatcacttaaattcttgggataattagctcatgacatggtgtactaaagtgttcacggaaacagggtctagagttcgattgttgtagtccccattcttctaaataaatttcagctcaaggtaggacaagtgatagctcttgggtatcagagcattacatgctgaaaagggacaatgaatggaggaataggagaatctagaggaagaggactttcactccagccacggcctcatgaactattcttattggtcattatgaaaagcatgcataagcttgtcttatgcatatttatacacacgaacgtaacaactcagcgggtagcatttgcagccattctaaccatccaaatgactaactagactcagtcacaacaaactaacaactactgctattcatgtgatcattcagttcttctccctgagattcctatcggtgagcctgcacactatccacactataggcccaaagggttctttcatgaggggacacattagatatataaaatcattcataggcttccacccaatatctaaagcttttgagatagttggttcatgaccactagcaaccagctactagctaatgtatttagagcccatttgttttaatgttgagtggaattgatcttgataaaattaatttgaatcaatgaacataattaggatgtgtgtccaattaatctgtcataaatttacattgggacatgtgtttttcattgaaaagtgcaagaattgatttttcacaccaaaacattgcacaatcaaagttggactgaaaaaaaataataaatcaaaatttaaaaacattaaactctaagaatacttgggcacaactgaaaatttctttttggtcacatcctccaaatatagcaaacgtgtcaacaaatgttggtaatgaatagcatacctgtgccacaaattcttgttcgacgcctctgcctgcagcagcttcttgctctgctgccactttccatctgttaatttcttcttcagcagcagcaatgtccatcattagtccctcaatctacattacaaataggccaagttgttactttgtgacagagaagtacaaacaatcaaatgtgccttacaaattatccacagcctaggatacacaacaaaattctacgttctacaatatacaaatattaaagataaaactgtttatggttaaggaactagatcaaattaaactcaaacaaatttaagcttacattttcatttgccactctctccttctcttcaagttcctctacccgatgcattctatggtcaagctccttggcctgagcttctatatgctgcttaagtaagctcaactctgcccttaatgcagttaagcaatatgcaaagaaaaaaagttatgatgtcaacacaactgcaaattgcaaatatgcaagcaactatgcatttaattctgatgttaagtaccttaattcacccacagtatgcttcagctcaatgatctcaagctgagatgcctttacaacatcctccaaagcaccagcctgcatgcatgcacaaagaattcattgatgggtcttcaaaatgcaaagtacgatgggaacaagtttcattaaaaactagaaagagaaacgaatgcttaaccagggagtatatttcatcctcttctttttccgttgtatcagacttgtcatttgaagctgcaactttcccatctccaagaagcttactgaatttgaaatctatcccagcctctctcaacccattctctgcagcttgaaacagctcactctttctagaagacggatcaactgcaatcctcttagacaaagcactcctaagaaaagaaccaatttgatccttctccctaactaaccgagccaccgtctcatgtaaactcttaacctcacgatccttctcctcaagcacatccttagctttctgaacagcaatcttggtcaactcatatatggactccatcccagacaaagaggcacgaatattctcctcaacatccgtttcttgtgggacaaacaacgattcagacagctcttcggtgctaccgtggtcaattatcctaacaacattgcaaatctggttatgaatttttgaaacaaaactcaactgatcaatcaacaaaggcctttgtgattccatccgagattccaacttactcaacttctcctcacactcaccaacaaactccttcaaccgcaaagtctcactttgctccttgctcaaattctccgaaacctcattcagcctctgatccctaacagctaaatccctctccaaatcctcaacaatcgaaaccttctttgcaacctcatccctcaagccactgatcgtggcctcaagctgagaaacctcaatggcaatctcgtaattccgctgttccatctgctccctcgcctcgttcctagccttcgtggtcgcctcgttctgcttcaaaagctcctccacgatctcgttcgcacgcttgattacgccgtacgccaccgccgccatgccggtgtatttctgcgaccgcggcagcgctttgccggcgaagctgctcaccttcgcggagatcttctccatgccggtgaccatcatgtggctcgaattcccaatctccgatcgcagcgcgtcgcgttccttcgcggtttcttctaattgcgtcgccgtcgcctccttctcccgaacggcgtcgtctcgctggcgaccgaactcgtcgcgcttctttatggcctcgtgtgccagcgccttcaatcggttgaacgaaacctgtagttctgacttcgtattctccgcggcaacgcgcgcttgccgctcccgatcgagctccgcgagaacctcccggaatttctcgacggagacgtcttccggcgagggaggcttcgtggcgatcggaatcggatcgccgccgtcgtcctcgacgtcgctgagcaccgcatcggcgtctaggtcgccggtgccgtccatttaatgtaatagcatatatacgaatatgtgataaaccctagaaattggagcgaaccaacaacatgggagtataaagtgggaactctaatgaaatgtgattttgtcttaggttgccgatgattgatgaagaaacaccgccacaccggacctaccagtcagtcagcctctgaagaatttcggattgataattaagaatttgtctattttttgaatttcaatttcaattgaaaaatagtgctgctgtggtgtggtgttaaaataaaaatgattgtttatctgttttaaattgacgaatgtgtaagtcaaggaaataaataaaaataaaatagaagagaaaggaatatgggtggtggggataaggatgaaaaaatggatcagtttatctaaaaataggttggactgatccatttttataaagtgggttaaaattattagtccgtttcactttaaagtgagttaatcgattagtgagtcagttcatttaaaaaataaaaaatatatttaaaaaaaacataaaaaaaattataaaaaattcaaataattatttatactaaaaattaataatgtactaacttaatcatataacaatgatttttaatataaaatacatatctaatagaagtaaaagcaaacagagaatacatgtctaacaatgattttcaattagctcctaagtcttaacatattcttaaaaatttgtttcaacatgatatagacaatctaagcatatttatacacgtagtataactcatcattaggtttcaaataaaaatatattagggttacagatttaaaatcactcacttcttcttagtcactcttattctaaaccattcatttaatgacctattatattttattttttttattggtggactgctgatcgacctggtaggctggtccggtcctgacccacatttggtctgacccatttattaaatgtgagttcaaaattttaacctgatccatactttcttgcgggccaaatagactgacccgttagatcaaactcgttttaccatcctaggtgaggaagtggggaagtgtgtttcacggcccggcgatgtgattggacgggcctgatttaggattggggaagtgaagatggcaatggtaggcgtgagggcaggggattggagtgatggtaggtgggacaaaaaggaaggaaatttcgtttgcaagggatgacacggagacagagagagactcgttgaggccaaaacgagcgtgggctgagatttgagactgctccttcatgccacggaacgcataatcattatagttttttctctcttgaatatcactgtataataggattttagtcctttagagattttttttagttcctgtttttactttagcaatattaaattataatgttacaataatatttataactcattgacttactgtgcacgtcccttgatgtgtatatttttttcgtaaattatattttgaaatttttatctatttaaaataatggatgacatcaaattaattaatacaatatttaaaaatataatttataaaaaaatgtaaatgtatgtagtaatgatgtgataaattaatgagatgcttatatgtgttaagtcatttattagcataattacttaacaaaagagactttactgaaattataagagattatactagtaagtagatttcatccttttatgatgcatgtggagtcacatctagagagataaaataagatctgttaaaattaaattaaaatcttaaattttttcaaattagaataaaaatattcttaaatcctatgtagcaataacagatccattaaaatagagttaataactcaagttaagttgttgcattaaagcccttaatagtgggattgatttaattagtttggtttacgaggtatttcttggaagtttcggtccttttgaacagtgggactcgtcaacgtagcaaaatgtatattgacatttcttatcagcggtaaatatttacgtgataacaccaactctacggagaaggatcgaggaaaaacacaagtgacttccactttctattgaatgaatgaatgaataaataaataaataaatacaaaggcaatttcttgtctcaattgctaataccattccaaattgacaatatatatataattgcttacttgtaaaaagaacattcatttacttattgaatgccgatgtaaacaaagcttctcaactaaagtgttaattaatttgtcctggagtatgattttaaggcttttcccatatttttataatcatagactatatataaactctttaggcttgtttgaataggaagaaaagattaatcagttgttgttgacttgaccttgctagctagtttccttccaacaggagctttcttaattcgttgtcctcttccttctatttagttaaacaaggagaagctattctacttgacgcgattagcgtgagacattgattattatccagcgtctgttgttaattctctcacaattcatttgcaattcttgtgtggaaacaatgcttctagaggtatggaaaaaaaaaatgttctgagttttaagtttcattgtagcatttgaggaaaggttgatacagtcatcatttgtggaaaggtgtcatttgattcagtcatcattgctccatagttcagcgcctcagtttatttttctctttcttctctttcatatttgccagttttttttttggccttgaaatttcttgaacaaattttcgtatgcgtcatttacttttagtttcccagaatttgtattttactgctagtcaaagttgtaaggttttgttttcttattcagtgttccagattggattatccgtgaacatatatatgcgatgcttttagtttaacatattgtttgcaattgcagctagagacttggacagctttggttgttatgtttttgcttttgttgattctaaaggagtcgatcatgggaggtaagagttcaaaagggtctgaaagaaggcatgtttcatcatatggatctgctggttcttcatattcacgggatagctatggataccctcaatcaccaaatgcatacccacaacaaaatccttataatacgcctcttcaccaccgtgcacaagctccattccacgactattcacagccaaaaaggaggatagataggagatattcaagaatagctgatgattaccattcactggatgaggtaattgttgtgatttgtttacgtataattgtgtttttgtcatttgcttaggttagatataattgtgttttttttgtatgaatatatgagtattttttcatcatttttggtttgttctgtttacatcattgactttttgtgtttggtaagaaatggggttagggacataatgaattgatttgaactagtatgtctatctacttcctacctgaacggcatcgatatttcatcagtcaacacaaaagggaggagaagaaagaaagaaagggaatcagttatgttctttctgaaatcagccttcaaatttctgcctatgatgatggtccacgttaaaaatcgaaatattgaggttcttaagtcttaataaggattcaatctaacaacaaacatgtttccccacagaaaagagtgttaaaatctgtgccgagctgaaccatcaaatggatctgtttggggctttgtgtcttagaaagtgggtatggacctaactcaaccccaaaagttagctcataaaatgagggttgtctcccacttatatactattttggcattatctctagccgatatgtgggacttgggttttccccaatacatcccctcacgcccaacacttttgggcttggtgcgtggataatacagtgggtggcccgttaatagatttaggatagactctgatatcatcttagaatgtgggtttggacctaactcaaccccaaaagctagctcataggatgagggttgtcccccacttatatactattttgccgctatctctagccgatatgtgggacttgggttttccccaatattggggaccatgttccaggagaaaaaaatgtatagaaatgctggattttgcaaaaaaaaaaattgcgagacccttgcttagaattgctatatttttactacaactccgagtaaaacctttatatatacttgtaaagtttcttttaagcagacctttatacttcagcagatctttgaagttggcatgagctttaaatccaagccatagaatatagttaaacaagttcagctgaaatgaagtggcttaagaaaagctgctacgaaaagagacaactgtctctcatttttattgttcttcctgatcatgcatgcatgaatcagcagagcatcccttaattcatttaataatatgagtagcagtaaacatgttatcaacgtctgatatgtccaaactagtccaagagtgcaatgcaacaaggttggtatgagaaaatatttggatgaagcttagagtagattgctttattttactttttttcttttctcatagtgcaacaagaccagcatgagaaaatacttattggttgtttcactccccaaaactttcattcttacggttattactcacagaagaacaccttattttgtcaaataatgaaataattttgcacaggttaccactgctctttcacatgctggcctggaatcttctaatctcattgttggcattgattttacaaagagcaacgagtggacaggttttatctcttagtcatatcttgatgcttggatttcttgtagtgagttgtggtattaattaaatttgcataaatcactttgaaatcagggaagaggtcattcaaccgaaaaagtttacatcatataggaagtggtcaaaatccttatgaacaagcaatctcgattattggaaaaactttaagtgtttttgacgaggataacttgattccttgttttggatttggagatggtaattccatatataaatattcatgctttcagattgcttatgtttcaaaattgcaaacttgattgtgtttctttcttgtctttttcctctgacagcatcaacacatgatcaagatgtcttcagtttctattcagacgagaggttctgcaatggatttgaggaagttttgtcaagatatagagatattctccctcgcctgcgtctagcaggtgttgccttcaccaataatctttcattgcatttttgacttaggctcagcatgactcattgcatttatgtgacaggacccacttcatttgcccctattattgagatggccatgactatagtcgagcaaagtggcggccaatatcatgtcctgctaataattgctgatggacaggtatttttaatacatatttcacaaaattgaaaagaagatttttttaaactagtgtaaacgtgcatcagtcatcaaatgtttcattggccgttatcacactaactatatgattatgactctaaaagtatcatagattttaaataaaaaaaaaactaaaatggtataggtttatgaaagcatttttttgtttggtttcttttgttagtgataataataatatctaccttaacacaaacatcttggcattgatagctgcagaagaaaactgctaattgttagattgttagattagcataatgtgtgagttctgaaatatgtctgtcgccttcttcactacaatattttgctaagattaattggatacatgaatacatctgaacaaaagatgaacttaaaatgcccttaattttgtcagtgcttcaacaatgattaatcttttactgtagaaattccttttcttcttatctataagatctaaaaacattgatacttaaaatattgcgacaggtgaccagaagtgttgacacacaacatggccagctaagtccacaggaagagaagacaattgatgcaattgtaaaagccaggtaaattttgtagttttcttttttctggattgccaccctgcattctcatactctttaaattgcagtgagtatccactttcaatagttttggtgggagttggagatggcccatgggatatgatgagggaatttgatgataacatcccagctcgagcatttgacaattttcaggtttggtgtaattcacttagtcctattgacctgccacggttacttcttcatagtccttcatattaagctgaaatgtgaacattttatttttggctgcatgtagtttgtgaattttacggaaataatgtcagagagtatagactcaagcaaagaagagacagagtttgcactatcagctttgatggagataccttctcaatataaggcaaccatagaccttggcatattggggtaataaatgaatattatatagaaaaacaaggtacttatagcatattaatgaagattttatctagatattaactgaacttgcttcgtgtcttcattgatgaaagtagtgcacggagaggacattcaccagacagggttcctctacctccacctcattatgagatggcttccagcagcagcacaatacctcttccttcaaacagttttcaacagaacacaccaacatattatgataatgttaacgcagaatcatcttcaagaaacttatatgataataaggtactatttagaccattcttttttcaacttaagatgtgactttcatataatctcgagacatatgacgtgatcatcatgattcatgatgtttctgtgtcacaagaagtcaacaatggtttacatatgacatgattaaccgcaggtttgcccgatttgtcttactaatgataaggatatggcatttggttgcgggcaccaggtaccaagttgaattatattctaccgattcatcttgatgaatctaagactatatgattaggacattatattaacttttctttccactgttgttattttctcacatttggcagacttgctgtgtttgtggagaaaacctagaatggtgccccatttgccgaagcacaatcactaccagaataaagctttactagttaaccttgcattgcagaaaaaaggttagttacgtttaaagtttaaacaatgtcataaactgagtgcttaattgttatcataagtcaaaaactaacgtgatatatcataggcagggtagcaaagagaggagcagggttagccaggctcatggtggtggataagtttttagatttttgcctaaccaaaactgcatttcgcaattttgaacaaaaataaatatatgccagggtaggagctaggaagagttgtgaatgcgcgttgcctcattgtacatttgaagtttgtgcgtcccaattaggtttcatgttttgatgtaagttgcttgtaaaaaaattcttaggtttttttaagtatactatttgtttttgttttcttcttgtatgtaaattatacacgtcttggtctcacagttcacttctttatcagtggcagcctgacagtcactggtgttcctttgacaaaatcaccataaacaacaaaacacgactaaataaaagagcttgtttattgtcatctgtcacagactgacacacattcgaaacttgtaaattactataaaaaaaacttttttttaaaaaaaaaaaattgaaacacaaaagtggatttctaaaatctaaatcaaattatttttaatttttaaaatttcaaacaccaacaacaagaagaaaaaaaagctacgaagaaagagatgcgcaatcatacaaagacacggtataattgtataacaaaatcgagcacagcacagattgtagtaaccaatagccataccaaaataagaagcaatgggcagtttattccactgccttgcattgcaagtgttgcagtgttccccgcaattcaggtatgaactttgttagccgttattttctttttatctcgaagcgaaactattgagtgcacgcacgatatatacaaattaataagtcataattttctgtagaaaatgcagaaagaaagactgttgccaaaggttgcgtgatatatatcacctacccaattattacgtagcactacgtttaagttcaagtgtttattaaacttcaaactagcgaactagatggagtcacggtacgtctacgttactattacaatgcaatcacataatgcatttcggatataaaactacattttttatctcttttttttccaacttttttattacatcccttattatatctatcatttttttatcttcctatccttccctgtctcaatcgaccccaaaatgaagtgtgggtatacatttttcctgcatttacgatgctaataatgcaaaacaacacttagagaatgggatgataatgtgtggtttccagataagatagtataatattcgttcgtatatttctgtttaaaaataatatccatatctaacttcatatttaagtaagtaataattttaatcctcatctttctattcattggatacttatgtatttatgtatgtatatgtgatccacaatttccttatctacaaggttaataataataaatcaataaaaataattaaaataattattacaattataataaaaatttattcttaaataattcaaacataacattaaaatacatacacacataatattaaaaacaaataaatataatattgaaacgtccaaactcaagttataaataaataaaattacaaagataatcatctaacatattgattattaaagttaatgttgtaatttgttctaattgcgtatgtttgtaaatatacatccgccagtatagagtttcaatattgtggatcattgtccgtttcgcttgtaaatattttaatggatacggtatgattcgagtacactttatcatctcttcttagaggaaaaaagaaagtatacaagaagaagaagaagcaatcaacaacattgttttactataaaagttagtaggatgttaaacataaagtttatgggaggaaaagcagtgtcatattaattgttggagtcactaatatgaacaaagactcacacataatgccataagaattttagttgaaggtctgacattaaattcacttgtgtgtttcatgccttgtttaatgaagatgtgaagtgaaagttgttttttgaagttagaggtattcataaaaaagaaaaaatatcaattgagttccttaaccaaccgactcaaatttccttattaatttatttatttttatttatatgcataatacaatgccattttggttcaaaagaataattaggatcggaatcaagtaatataaattttttctctaattttaaaaataatataatatatataacaaatctaatataatctaataaactaaaacataccaacccattcttgataaatagtttggatttaatttattaaaaaattaaaaattaaactaatatattttaatttaatttgtttaattttcttttttagacctaaatcaaacccattttatgaaccctaatcgaggctgattaaccgtcaaagaaaggaaaataagagaaaatcatatttacggagtcaggattttcaaatggaccagttcaacacatataattggtgaaggatccgagaatcaatttgtttgtatttatatgcgttaaaaaatctgattagtcgtgcaggttacatcatatctcaataatcaaatgaccacatatttttttacctttacttatttttaaattaacattgcatgacttgtaggatgaaatgtgtggtaacttatatatagttctttttttcgcttgaacttaaaattaaaattaaaatgcccttttgtcttcaccagtgtattttttaggagtgaaataaaattcagaaactttcaaacactggatctcattatttacactgactcacaataatatatagatattaaacttagtcacacacacatatatatatataattcattatcaagaaaattaataaatatgcaagtagccctcaccttaaactagtcaccttgttcacctggtgagacatagaaattgaattctcttatattattgagtaacatgatataattatgtacatcagaaagagagaaaaattgacacaattttttatttatcaactagaacttatgcaatctatcatgatagattgtaggatccatatatgttataaggaataatttaatgaaaggaacggataaagatatacttctctgttatattataattgttaggtaagaaaaaaattatcttaaaataattttaattttaatataatattaattattattttttacttgtatcttttatatatgaataataataaattataaaatctaaaaatgaattaatggtaataaaatattaattttataaaattatttgtttttatttatttattattatttttaataaatataaaataactttaagatgataaatattttgtaaagtattactttaaaaataaacgacaaaatgacattaaataaacaagttgcttaaacttaaaaaataattttgttgccacatgtacaatcccacatcctcaagttatatattgggcttgttcaggcgtgcagagaatctcacaggtgcggaatatgatggcataggcaaacaacagatgatactactgaagaaacacgaaatgggaaggtggtcatgcactttggtcttcaattttgtctctgcactaataacaataatattgctctccggacccatagttgaagttaagggtcttccacttcacacggattcacgatggatcgtgaacgaagatgggcagagggtgaagctggcatgtgtgaattgggtgtcccatttggaagctgtggtggccgaagggctcagcaaaaagcccgtggatgtgatttcaaagggaataaagtccatgggcttcaactgtgttaggctcacttggcctatacttttggtcactaatgactctcttgcttctctcaccgttagaagctcctttcagaaccttggcctccttgaatccattgctggtgtccaaaccaacaacccctccattatcgatcttcccctcatccaagcttttcaggtaaattgtttttgttatcatattcaattcaattattttctttgcctaattaaccaatttgttgactaatttgaatcacctcatcttccttatcttctttgctattaatcttatcatcatgatgtgttggcgcatatttgatggcgattgccttttggtggttattgaaaacagctccaacctacttccttattaattgccatttatgttgcatatagtgagtagaatatgtttttgttatttgtcttaatttacaaacaaactctcgttttatactttctaattccaatcaacattgagcattaaaaataattagtaatttaatttttttaattttaaataatcatatttatgagtttaatgtctatacaaacccacacgttttctccaatttcttccttcttaactacttaactaatcttatatctctcatcattataataaattgattgacttttatgataattattttaaaatttatatttacacaattgtgattgaatgatactaaaaaatattttatattgtagacattaaactctttattttattataaaataattttattaactaaattcatttttctcttattttttttataaaattattatgtttatattggacagtttcttggtgggtatttttaagggtgatattttttaagagtccgaaccacactctcaactaacttccgtatagtatgagtttgttcaagtttgagttgagtgtgggcaacattttgtgatgactacaggcagtggtgaaaagtctcggggacaacgatgtgatggtgatattggacaaccacataacccagccagggtggtgctgcagtaactccgacggcaatggattcttcggtgacaaattttttgacccaaaccagtggatattgggcctcaccaagatggccaccctcttcaatggagtcactaatgtggtgggcatgagcttgaggaatgagctccgagggcccaaacagaatatcaacgattggtacaagtaagtgctcacagtcaaagtgtcttttttttttaagaaaagtcaaagtttgtataatactttctctatttctataatctaaaaggaatcatattaatattgtaattgtgggtcgaacagtatgcaattatcaaaattaaagtaaaatagtgtttttacatgttaaattgttaatgatgttgtctctcttatgtgttagctagatgtggtaatatgagttggttagtcccatcaaaaataattgggttaatatgttctgtctcacattttatatatagattacagattaaaagtgacaatccatctcatttttggttggattagtccgccaaaactaaatattaaaataataataaatatattttaattgattttaattaattttattttttataaatattaaataataaatacttattaaaaaattaaatttattatcttcaattttaaataataatttattttaaaaaataattaaaaattaataatatatgtacaaaatatcaaaataaataatatcttttaataaaaaagggttggtggattgatccacctgattttctctcagctcgttttttgactgacaaaaatggaatgagtttaaaattccaacttgaccttaaaaaaagccaaaataagtagacatgataagaccaatccattttgtcacccctaatatttgctagagcatctagattttatgttcaatattttgttgtattgatgtcattattctgaatgaaataatataagttacttgcagtaaaaaaaacatcctctctccctctcttttttcaaaattagctggtggctggtgctagagtaaatacaattttaagttacttgtaactgtatgagggataaaaccatggtttatttaaaattagaaagaaagaaaaataaaagagagagaatcctcatgtgactaatatgttgttctgaacaaaaggtacatggtgaaaggagcagaagcgattcatgcagcaaatccggatgttcttgttattttatccggcctgaattttgataaagacttgtctttcattcaaaaacggccagtgagcctgacatttaaggggaaattagtatatgaggcacactggtatgccttcactgatggtcaagcttgggttaatgggaatccaaaccaagtatgtggacaagtggcaggaaatatgatgagaacctcaggctttttagtgaaccaagggtggccattgtttgttagtgagtttggtggagacttgagaggtaccaacgtgaatgacaaccgctaccttaactgcttcttggcagtggcagctgagcttgacttggattgggccttgtggacacttgttggtagctactactttagacaaggagttataggaatggaagagttttatgggattcttagttgggactggacccaagttagagataccaatttcttaaacagaatctctgccctccaacttccatttcgaggtatgtagtacataatttgtgcaaatattcttttcctaactctacactattagttggttgaaaaatatcactaccaatttactactttagggaaactttgataaagctatgatttttttttaatcctaatccaaagttaacgactaatcacttaaagatattgagatctatttaaaaaatattaactttcccaaaatatgtttctgtgtacgcacatatctggagatcgaattcttaattatatacttaaggatcaattatctgttaaccatattacacattgatagagatatcatataaaaatgttcatgttactaaaaaaagtattgagtttgctaccattgatgtatatgttgttcaacaaaaaataaattgccaatttagcacttcatggaaacttgaactacatttctctctgttgacaacatgcaggtccaggcataacaagaggcaatccatacaaattgattttccatcctttgaccggtttgtgtgtcataagaaagtcattactagacccattgacattgggtccttgctatttatctgatggctggaaatacacaccccagaaaattctatcaataaaaggaacttacttctgcatacaagcagagaatgaagggatgcctgcaaaacttgggataatatgctcagatcctaactctagatgggaaatgatctcagattcgaagttgcacctctcatctaaactcagcgatggttctaatgtatgcttagatgtagacgataacaacaacattgtgaccaatgcttgcaaatgcttgagcagagatcgtacatgtgaccctagtagccaatggttcaaacttattgacagcggaaggagatcaatgttgacaacctcaacatcatccatgctaaattcatcagacctttatggaaaccattaagctcagcataagttgttttaagaatattaccgtaaatttctctaaccatgtacttatgttttaatggcagggaagtgatgcattaaacatgtccatatatatgactattgaattcaatacatattatatcactattaaaatatgtacagaatttactaacgttggctaggatttttggctcaagaccagggcaccattgctaaacgacaccaaagtcaacatagtacattgtgccatagagaatattatttcaggattgtgatcaaagcagggatggtcaattatgtaatcaataaaataaaattaagaaatatatttgaagaggataattaaaaataaataaatgttaatatataagattgagataacacgtgactcaatgacaatgaaaataactcctgaaaaaggttatcattaaataatatctcctaaaaatacttttattcaataagtattcttaaaaacattctcattaaaaaaattcaatgtaattatatagaaataaatattataaaaaaatcaagacaaccttcctaaaagattgttgtcaaaaatattaattaattttacttaataaattttaaatactcattttaaaactatcaattagtacgaagttgaaaacttcttacatgcgtgtttctttactacctatacgccgccttgacaaaaagattttagtccttgattttgcacaaccttccaaagctaataaagaagagttattcacctttatttgtataagatgaattgtatatgtagagaaagaattatattcacttaataactactacactttttcttttcgtcatggttgcatatactttaggggaatcaatctagtgagctacttggtacatttactttcttaatagcgagttagactttctttcattaacatttataaatgaaaacgaaataaagtttatccataagctcagacaacttcaggggtgtgaaaaaatcgatttggtaaaaaaaaaactaatctgaagtggtttcaaattgtttgaatcggtttaattttacatttaaatagtcaaattaatttagaaaatcggttcagaattagaattggttttaaaaaccgtttatgaaccaaattgattttaaactaattataagaatcaaacttatttcgcactgaactgatttttttcaaataaaaatcaaaataattttggataaagatcgcttcagtttcaattcaattataatcatgttttgtttgaatcaattttttttacacccctagataacttatatgtataaattaaaatgagtttttagagaaattaaataataaaatttttacaaattaatttaagtataaaataaattatatatatataaaaagtttaattattttaatttttttcttcagaagtttatttaaacattttttagtacaatatattttggtatgtgatttctgaatgtgaaaaaatcatgtgaaacaaaggagttactcatatgagaaagatttggaaggtacataacaagatatatagctcggaaagggaatactttaagaaagacaatgacaaaataacagtagacagaaacacaaattccccacatgtatatatagacatcctattcctatgtcttcaataaacaacatattggtgtctcattagctcgcgtggaatatcaaatatcatatgaaatggaaatgggtaagtggtggtcgagcacgttggttttcgctgttctctctgcatcaatactaataatagcattactctcctccgatgatcacacagtgcctgtgacgggtcttcttcacacggattcccgatggatcctcaaccaagatggccaaagggtgaaactagcctgtgtcaattgggtatcccatttggaagttgcggtggcagaagggctcagcaaaaagcccgtggatgtgatttcaaagggaataaagtccatgggcttcaactgtgtcaggctcacttggcccacacttttggtcaccaatgactctcttgcttctctcaccgttagacgatcttttcagagccttggcctccttgaatccattgctggtgtccaaaccaacaacccctccatcatcgatctttctctcatccaagcttttcaggtaagtttaagttaattacttctatttcttacccaactcagttcattcataaatcaaccttaccaattcgttgactaattttaactacctcatcgtacgtgtttttttagttattaaatcttgcacttgatcattgatgttatcgatcggtgacgcttatccgatagcgattgacttattgtggtttttgataattgagtgcttcaatcaactaatttgctatgggccagcttgccatgtaaatgtcgcaatatccttattaaattcatcattgttgacgtgaacagtgggctaacctattttttttttcttccgttagcttcttattacgtcatgcatgcataattaaattgctaattttttttgttttattgaattttcaacaatacaaaatatttgctctgtaaaaatgtttttttgacttaattacatttgttgatcgttttatttgaaatatgtatattttggtttgagctaatttgatttctgtttttaaaattaaataaatttgttcttctattgattttcttctacttgaattttttaaattgttgttttttattcaaatgtttgagaggttgatgatttagtgagaaaaaaaaaatttaaaaaggataatgattaaggttaaagagaaaattaagaaattgattttttttattttgaacaaaatttgatattttagtgagtgagttttgagtaaaagaatatttataatcattaaattttcaaagattttaaaactaaagatacttaattagtaaattaattcaaagcacatgtgaggaactaaaatctcacataattcaaactaaagagatttaaaatgtaattaaactataatgaaactaaagaaattatggtgtgacatagttaagagataataatgtgttttaagtatatagtatagagtttaatctctatgtggtgaatataaaaattatgttaaaagggatcaatcctcgaaatgaatcatagttttagaaattaatccttaactttggacccaaaataattctgaatatttgtatggccatgagttgagtgtggtgcaatattgtgtgatgtgtccaggcagtggtgaagagtctcggggacaacgatgtgatggtgattttggacaaccacgtgacccagccaggatggtgctgcggtaacacggacggcaatggcttcttcggtgacaaattttttgacccaaatcagtggatattgggcctcaccaagatgaccacccttttcaagggagttacagcagttgtgggcataagcttgaggaatgagctccgaggatctagacagaatgttaatgattggtacaagtaagtaactgctaacaactacaacctcatcttgaaatggacctaaaatgataatgtgataaactaatgaaatatgtcagattattacctaataggtcttgactgatcataattactaaaatatctaataaaattgaaattatggtagtaaaattaaaataaattatattatagaaatgaaaaatatatttaagcatacaaaatttgtcatcagaaaacaatttccaaacattacaattccttcattgttcgctggcttgttttacaacacggaatcaatttcctacatagttttggtaagatttatggctatgtagatgatttgcaacaccaaatcatattcccaggagtatgtcacaacggaatagtttttaaaaaaaaaacaagaagaaagaaaattcctgtatagatgataattaagttgttattctgaattgaaggtatatggtgaaaggagcagaagctgctcatgcagcaaatccagatgttctagtcattctatctggcctaaattttgacacagacttgtcattccttcgggatcgaccagtgagcctgacattcaaagggaaactagtatttgaggtgcacaggtatggcttcactgatggtggagcttgggctgatgagaacccaaaccaagtatgtggaaaagtgacagcgaatataaagaaaacatctggcttcttagtggaccatggatggccattgtttgtgagtgagtttggtggggacttgagaggtaccaatgtgaatgacaaccgataccttaactgttttctggcactggtagctgagcttgacttggattgggcctattggacacttgttggtagttactacttaagagaaggggttataggaaaggaagagttttatggccttctcacttgggattggaatcaggttaggagtaccagtttcttaaacagaatctctgccctccaaattccatttcgaggtaacgctgcgaccataaccactaattaggacttttttgtacttccttaattcatgtttttgtagtataagcaatgcactcttttatacacttcttttaacatattttttattggttaaaacttattgaaaattacaaaatcaagaaacacattcattaaccttaaaaaaaaaaaaagagataaaattcattaaataagatataagactcataaaattttgtaatttctaataaatttaactaataaaaaagaatgtttttaaaagaatatgttcaaaaaagtgtattataacattcctaacattttctcttgtgccttttgcttttgtactcgcccttttctgttaaagctatttttgaataatccaattttgcacatacttcacaaaatttgcgcaattattcttttccaaactgtgcactattagttggttagaaaataccattattactaatttgtcacttaattgtttgacattgtgcaggaccaggcatcatagaaggcaatccacacaaactgatattccaccctttgacaggtctctgtgtcataagtaaatcacagctaacatcactaacgttgggtgcttgctcttcttctgatgcctggacatacacatctcaaaagaccctattggtaaacaacacggatttctgcatacatgcagaggatgaaagaaagcctgcaacacttagcatgacatgctcagatcctaactctaaatgggaaatgatctcagattcgaacatgcacctttcatctaacctaagcgacggttctattttatgtctagatgtagatgataacaacatcattgtgaccaatgcttgtaaatgcttgagcaaagataacacatgtgaccctggaagccaatggttcaaacttatcgacagtggaaggaggtcaatctcgacaacctcgacattatccatgctgaattcaccggaccttttgtggaaatcattgagctcaatataagttgcttttaagaatttgggtcgatatgttgtactcatcaaaggtatcccttgcttacgttttaattgcatgaacatgatgcagtaaataagcatatccgtgtgaatattcagtacatagtataataatagtgaaaatgtataaatttattaatgttaacgaggatttttggcttaaggagcttgaatgttgcccaacaccaaaatcaataatgtgttgcggagaatcttgttttaggaggtgataaagacttggataaaatgatctatgtgaacgaaattttcatgaattcaataacacaaatattaatatggtggcaacttacgttgtggacccaacctaaaactttatcttataaaattgaacaaagtttattttcgcaaatcctttacatgctgccaataattaagttattgaacagagctttagttccagttaaaccctgcaagtttcgaacggtcaatgtcatcctaaagtgacagcaagtatatccttgcaaactattttcacactttaataaatagcaatgattctttcgcatcatagaagttacgaaagatttatacctttcttgcaataactcgtagcttgtgattcgtctttgtgaatttattatacttttgtgtgttggtaatttttgaaacgtgttaggttaaaagtgcatgtgaaaaaactactgatagactaacaggttgccaatataatgaatatatgaaagttacgaatgaaataacctaaaaagtttacagcactagtgtgatttcatttttatctgacacaagataataaaataagaaagccataaccgatgatgaaggtataaattcgacaaatcctttatctgatattccaatttcctttcttactttgtgatttgaaaccaaatacaagtaaggtaaagattcaacaaaatttggcatcaatagctatataagaagccactggcactaactagcagtgtagcaataaccaagcccaaattcatcgatcctaaacattatctattttgatcttcttcctttcttgcatccttaatttccgttatggtaatggtgccacggaagatgcaatcggggcctaggcgccatattttttcagcatcagatgacactacaatgaccaaacatattcgtgccactcatgctcccgttgatggacacattgacgttagacctctttttcaagttgttgaagacatttttcaccgtgcagcctctctcatccctctctctctctctccagaaattattgtatgatctcaattaatctttacgtgatttagtacatagtcaaaatttcaatttattagaaagagtgaatgaaacttagctgtattaagtggagaataatggaaaccatatacagttgtcgtggaacatacaataatttctctcctccctcactttgcattttggttcttagttaacttggtttctgagtgtggttgtttttgaaattttacacagggaaaacaagggcagatggatgccatgaagagcagtgcataccaatctgatttagctaatgtgctagatatttcgtaccacgcaatcaacaaaattttctgcgaggttttcttattcctaacaataaatcttttcttacaattctaaatctccctctgtataaatattgataatagccacaactatttaaacgcctacaacaacaatactacctccggttctttttataagaaaaagaaccggagagagtactattttatctattgtgtggtttaacttattcatgttctcatgctgtgtaatagatgttacaagcgttcgagcggtggagatgtacatgccacaatcatgggaatactgggcatgctctcaagctattcatgggatgccaaagtggtgatagcgttagcagcatttgcagcaaacttcggggcattttggctggtggctcagctttatgccaccaatcgtcttgctaagtctgttgcaaagttgaagcacatccatgaaacactggaacaagtggatgatttgggaccaaagtttcaaacaatcaacaaccttctcaaggcaatgttcgatgtaaccaataacgttgtccaattccttgagcttcactctcagtacattgaccctgaggtcccagagatgttgactgcttccaatcttattcccggtgctgtctattggaccattcggagtattgtatcctgtgcaccgcatgttttaggcataactggcttgggtcaagggtatgcctccattgttaatgtcatattatactcatcacaactttatcttagtaactccggttaatttctctttttttttaccaaaaaaactttaatcaaactcttgattgaacatgtctgttttgttatcattatttttaactttattggcccataagcttgataacataaatactcaccttcgaatgcaactcaccatttgtcgtcagcatttaggtaagtcattatctgcatatgatctttttttcttgggtgcacattttgtatggacttttagtttaatgtttctattcagcgggcttaccagaagggctttttaagtttccaaaaattgaggataaagatcaagaaattaaatttcaattatttgtcgccgagagatcccatttatacataatgagcacctcacccctttctttgtagttggagttgggcaagatttcacttgtaatgattggctttagatgcctacgaagtttggcattcgtgaggacgcagccatgtcagaaagggcattctcgcttggatccaggaaatagctctcagagatctttattccttttggaagaaagaggagcagaacgttttttatactatatttaaagagttacttgtgacgtaatacaaataaactcgaatatggatatgactttgttttttcaacccccaataaattcgaatattatggttatgattgttttgatgaatgacttgcaaaattaattttctttaaaattgaatttgaagggatttgtgtttagatttttttattctaaaagaaaatctataataaaattcaggataagtttgtttatcaaacacaaaagttacttaatggttgttttaactcaatcaattttacttagaattaactcctttgggatcaaacatgttgtgattttggataatttaaggtgaatccaaacatgaatcaaaacttttggcaaatgacccaataaggggaaagctgtcctgttccaaccttctaggtagtttgtcttcatgttagcattgaggtgttgaggaggaaaattgtgctactctacataacagacctacataatgtccctgatcaagagcttgtgatttttgaacaaatgtactaagagtcacgtcaggattcaaccaggttagagagtcaatacgaactcgtttggattccagttgtggacaaagcaatcccatggactaacgtgaaaccaaagtttgagaagctgcaaccaatgatgtcatgttactcactttatgacccttctctattggagcccgcaaccatcaggtacattaaagaggtatggctgttcaaaacgaagcctattcttgtagagttggatccgctagggaaggttgtgaatcttaatgcaatacccatgatgtggatttggggaagcttggcttatcctttctctagctcaagggaggaagcactgtggaatgaggaaacatgggaacttggactattggcagattcaattgatccatcgcttttggaatgggttagtaatctttacattattttctttcttgtgaataatatgtttatgcaaaactagcactctagtataacatattcaaagttgagcaatgaaaagtctatgataagatcacataaaaagcaacaattagaactcttacagaaatcaatactccttgaaccatgatgaatgtacaatgatctaatgcatatacttggtttagatatcaaaggcaaatatatatgctcgtatgaaggggatgatatagagtggatccctaaattcacaagcactgcatattaactggcaagagctctgcaactaccactagagatgatttatgtggggaaaagcaatccagggaagaaagttcaagaaatcaacaatgccatacaagcagaaaaattgagcaacatacttcctgacctagccataatttggttcttttgggttaggctagagagcatgtggcactctaaatcacagcagagtaaaacagtacagaaccaccatataatgcatgaagtaatgagaatcctaacctacgatagtggtgacccaggatgggctgtgattagtcaaggaacaggaaagatggcacagggcaaaggagaagcatttctaaagtgcctaaacgaacatgagcaatggagggatgcagcaaaagataaagggcttttgccagcaatgcatgattatataaaagaactccaaacccctcaccactgcaattgcttgatactcccaggaaccagtttaggataccagacaaagtggcctgtgctgaatgtggccaaacaatggaaaagttctacatgtatcactgctgcaacgagtaaactcctaacatcacacacatcacctaatgtataatgtgtaataagtagtgtgttaacagggaacctagcacattgatgccaattgaaactattggatgaagataccacttatacgctaactagtaaattagacttaaaataaattcaatactttaaccagcaaatctccatccaacaatttcaattaataagttgtgtgttaacagggaacctaacacattgatgccaattgaaactattggatgaagatatcacttatacactaactagtaaattagacttaaaataaattcaatacttgaaccagtaaatcttcgtccaacaatttcaattcactgactgcataagtttgttgaattcctgtatgaattccaagtgttgcttaatctaggttttcaattcagacagcatgacatctgcatatttatggtttgattgtaaaggcttgtaatggtaatgcaaaacttgttcaagtcatttcttcattagattctgtaagatcctctatgttgccttttggaaacacgaattataatgacataaaaaatggtagcatagtcatttcattaaaaaatatttctacaaactaactaataattacaaactaatatatcattggggggaagatttaatggcagtggaaacagagttccatatctgagcaagaggggcaataatatgaggcacaactgcaccaatacctttgagggcagctcctgaggcaagcccaattgcaaaagtctcaacataaccaggcttggaatcgagcttcatgtcaataacagtgagtctattgctaattgaatcaatcttcctagaagattcagtcaatagcttgtcgtgcttacctttgccagaggatatgactccaaacagagccttctgaagatcctcaatgaccttcaacgacgcatcttgcgagtccataccctgagattcatagtgtgatatcagctccttcggcgtcggaagcttcactttcctcgacggtttaggtccaactttaggtatcgttacattaggcgtttccatttctacaattttaatagccaagcgtcagtgtttattactttactctaatctttcaaattctcattttcagattctgaaatctaaaaatcagtttcattagaacgtcattgacactgctcttaattgtggaaaatgaatatatagtaatgaattgtatgtaccagaagacaggtagcatagtgtagcttagagaagattacaccacgctgtttaaaactggttattcaagacgaattaatttatatatgcttcggaaactagaacaacccccatggaataatcagggagagttcaccataagaagcaaccgttaataaataaataaataaataattgaactaaaggaatggcacaacgagaccatggaacagactacgaatgaaatagtgcgtagctgttcaagtcacaaaagtgacaaaagaggtcaacattgcaattcgtatacgctttcgttgacacgtccttcggcgatagaaactgacaaagaacgcaacgcctatcaaaagcgacaatagcagaagaactagttcaggaagaaatgagaaacgagtaaaccctagagaagagaacatacttcaaaaagttcaagcaatatttgatgcagaaattcggatgagtgttcccttggcctcgcggcgttagggtttatcccttaattgaagaaaatagggggttctgcctctgattttataaagaaaaaacagaaccaagcctacgatctaaactagtggtagccaaattgggcctaggccccgttgagatccaaaaaattggtaaccgaatggattttttaaataagaaaaaatcaacttaattttgggttccaggctgttgttatttacaccttcctattacgaaaatacctccttatattttcttttaatttgttagtcaaaaatgcatttttatataaaaaaaaaatacaaaatctcattatcaataaattattcattcattaaaaaaaacaatgtacactctatttttcacctcgttttcaataatttttaaaccctgctttttaaatcccatcttcattattctttaatctatttttttcatatgcttttcattatttatctactgtatccaatataataatacatttcatttatttatagaaatattttttttcttatgttagagaggtgaaaatctatttattttttactaaatcattttttaacatttgcatgtgaatgtgaatcaacccaaaaccaaaatgtctgaacgcggaggcaaaagaggagaatggaaagataatcatacttgtcctcgctggagaaggaacacccaagaagaacaatgttggcgagaggaactgagaaacgttgttaaaaataatcgactgatgaaaaggaattgaaaacaaaaaggaacaggcaccatccatagaaaaaccagttcataatattattaaccaagacaaaatgactagaagagatagtgctggaggaagaaaggtgtcaatagatgtcaaagaggtgacttaaatagttgtttggtacttataacataaggttgtttttgttttgattcttttaattttgacttgaatatagggttagtctgtctctccacctgccttcaacacattaggttagacaagttagtgggttgaaacgtctaaaatgttctattattttattttatttttttacttaagcaagttgactcggcaatttcaacttaccctgtcatccctatataatttatttcatttttttacatttcattcacaaaaatcatctttcctgttatactaaaaatgtaagtgatgttattttattaatagaaacaatattaactaaatggtttatatttgttttcattgtgcatgaaaaaacatcttttttaaaagacaaaactatttatttattttttcaaaacttaattgatcagggggaaaaactttaaactccataagattgttgtgataaagacaaattacctaattataggcttccaataaaagtatcaagatgtctatctatggtccaatttaatggtttgctaattacaatgtcacaattgatcccaagttcgagacatgacattgcctttgctcaaccaaccaacaacaataaaagtatcaccattaaataattgtgagaagtcctaacatacacattgcatgaaaaagaagtataaaaatagcatatgaaaatagtaagtgtcagaatcaagaaataaggtaaataatgtccggaatattttataaaaaatgaattttatttcaggtcttctataattttttgtttgcattgagtcataataaaaaaaagttttcttttaaatttatgttgtaaattaactgataatgtgtcagttaaaatttttaaaatacaatcaactatcctatttatttataattttaagttataatttatgagagttaaaaaccattaaatgaaaaaagaagaaaaacacgttagatatgacatatttcacaagcatgtcaataaaccccttccaataccaacactcccaaaataacaaaatgacaattaaacatccaacaacaaagtagacactaaaacttaatcaccagataagttcttcctattcctcaataagtcaacacttatttcgaaaccccttaaacttaactcccaacaaacccaaaacactgaacaaccaacatccaagttgcaaaaattccttagatatgaaaatcattgatttggaaatttcagatttagaggaggaagctgtcagggtaagtgacttgattaatgaaaatgagacaatcaaggaccaccctagcatggtagatgatgtgatggataacaatgaggtaattgatggtcgtattagtgtttttgttccctctctcttcatcatctcatgccctctaccacagtcatgagagcttgctagctcattctcttgtggtcttagttccccatcctgttcccaagcttttgttaatccattcatcgtaagcaaaatcgttgttcggcaagtcaaagtatatcaactaagtcaacatggataagaaattgaatacaatgtgtctcgacttaaacttgcacatggtgagactactctcaaaataactagaaagggacaaggatatagtgataaaaaatttaaacgagaaagcaagaaagcaataaatgatgttgttttgtcaccaacaaaataataaaatgtgcctaaattgaaaactataacggtaaaatacacgaaaaaaataggtgataaaattcataaaagataacttcaagtgataaatttacaaaattatgatatataattgaatgataaaatatgtcaaagatttcataaattatttcatgctccaattagtgacatgattttataaattcacattgaaaatcaatgttaacatataatataaaactttatcccatgagttattaaagtgaaatattaattttaaatataaaatgacacacaaaaatattgttatgaacgcactgaatctccaaaatattacacaaataaggagataatataaatattaaacatcaatgttttatggaagtttttcataaagaaaattgatacaacctatcaacaataattaattgctatatagagaaatataaagtaaaaaaaaaaaaaaactcattttcaaccactaattaaaaaaaacaactcaaacacacaagttttgatgcaagaaaatgaacacagtattaaatggtttagttcaattaattaaatagtgtgtgaattgttataaattcttatatcaaaactcaattataatagataaataatccttataactcaatttgataagtaattgaacacttaaagagtaattgtatctgtagttgataaaaagagaataaagtgttttatagctcaatttcttgaatttgatgatgattaattaattttggttgatgatatttaattaagttttttctcaatcatatttttcattcacaaaattttatcctaagattttgtttaagagatcctattgacaaagtatattgtttatataataaacatatatacaaagataaaaaatggtgaatgtataaaacattataaagtatgaataatagtactcttaaaaaagatcccgttacatattgtaatatcaaatcagtttaaaatataattaagggcataattgatctcacttctacaattttaacatagagagattgtatttatacaataaaaataaataaaactagtgaaaaaatataaaaaagagtttaatttccacacactaatgtaataaattttaacttttttacattatcaattaattagacattaagtggtaatatttgaacacctatattttacaaacattctataaatatcttttacttttctccatctctgtcttattaattgtttatattttctgtttaaggtgaggtttataaatcaacaaggtgtttatgaattgttttcctcaaaaattataatatgaatgaattttaagaaaaatttaaaaaatcaacaaatttattatacatatcaaattataatatcaaattatattatgacaatagtgtatttttatttacaatattaatgtaggctccatcttatttaacactatcttaaggatggaaatgagtatcacggcatttagtctaacatgacttgtttattataaatgtcagactataactctttgaaaaatatatttacataaaaggtcaagctcaaacttaaaaacaaaaaaactgttagactaacctatttaatatatataaatttaaaaataatatatttatttttctaaaattatttttccttattatgaaggtggatgatcaaccacttcaaaaaatcaccttgaaaatctcataaaataattattacttatttgaaaatataagtaggatgttgagatattttctatttaaaatttgtttcattaactttgataaattgatataaaatattttgtaaaattaattttcctaaaaatgttttttcgtgtttgggagataggagatggcttaggaattaaaaatttattcgattttgtatataacttgccttggttcttctttcttatttattttagtatttgacattaagactatattattgaatgaaacttatggtattttatttaattgcttattttgtttataatattttgttgaatacttaaaagtactttaattaattttaacttattgtttttcactcacaaatttaaaggaaagtatgcgtttttatttatattaaattttaaaaaatactatgcaaattttcaaagttttaatgtataataattaaattttctttatatataatatttattgtaaaatagattttttaataggctcaataagtcaaaccaaacttttaaataggttataccaaattttatatttttaaatcaggatctaatcaaatatggtgtgaactatttcaacctaactcgacacaatattttttttcattatttttccttttcatctatcactaattttttaggaatttaatctcaagagtaattgagtgaagtaagacaaaaaaaaaaattaacaaatttaaaacatttttttgagtttgaagacttttcttgtcctaaattggtacatcattcccttccctaaatttttaacgtcgacaaaagaaatctaggaattcaattctccatcatattttacattgtcaatattaaataggtttaaaaaaaaaggtataattgatctaacataacttccaaaatttacaaaaagagaaattttgcctttattcaatgaaatttacaataaaagaaataatggaaagacaacaagtgttgtaaaaaaattggtttgtttttatagctgccatcataaagatcacaaaaatcatgacagaaatgtcatattcttatacatattttcttactcagtacttttttcttcattgttctctactttttccctattcggctatcatcaattttctaggaaatcaattatcgatcattatcatgactgactggtgatagaaacctgccaaacctttatctgtccatcaagagagccactgaaaaccgagacgctaaatttaggtgaagtttgatgacagtactcctccggaatcgccgccaaggatttcaccggtttccggtgaccgtcgagcacagcaagacatccaaaccgtccatgataagcgcgcttccaaatcctaaccgtccgatcagccgacccactcagaagcaaatcagagacgtggaccaaacacagtatggccttctggtgccccctcagagccccactcaccaccatatggttcgcactgtcctccctctcccacaccaatatggaacggtcacacgcacccgaaaacagcaccgaagcgtcgtcgtttaacgccaaggcattcaccgcggacttgtgcttctccaacgtggcaaccagcacgtgccgcttctctccctcgggcctcgcccacacgcgtatgcgcctgtccgcggatccagtgtagacggttccatcgttggacactgcgaccgcattgaccgcgtcctcgtgcgccttcagtgactccacgcagcgaaaatcagagagccgccatatcttgagagtcctgtcccacgaaacggagtagatagagccgttactgacggcgagccccgtgaccgcgtccgcatgctcaatccagagctgcttatcgtgacggcggattgcgacgtagttcttcgggaggaggaaacggcgcagacggtcgttgacggttgggagagtggctaccatgctgtggtggtggttcttgtggttttgccacacgcggatcttgcagtcttggtgggtggtgatgacagtgttgttattgttgaaggtgatggttttggtggagttggaggtgggttgggtgttgaaggcgtggagggtggtgcacgtgtggcggtcgtagacgttgatttcgtggtcggtggcggcgtataggaggttgttgttgacggcgagggaggtgacggggtgagaagggtgtggcgtgagggtggtgacgcaatggtgggagacagagaaggtgaaggtttgtggagagaggttttgtagagagggaacggatgggagggtttgtatggagaggttgctttcgagggaggaagtgctgttgttggaggttgttgaagatggtgcttctgaaatggaggagtggctgatagaatcatcacatgcatgttgcttttgtttggggagtgatgagattgttgagtggtgggtggcggtggcgcagttggcggaggagcatgtctttagccaccattggatccgcatgattctgttttagataacgtggttagagaggcactgcaaaataaagatgagaatcacaaagaggagaaaaggaaaattttgcttaagcgggtggaaatggtgacacgaacaagagaaaaaagggtaagaggagggaacgatcaacgatttttaaattgcattttgaagtgtgtattgagacagatggagcatttactgtgggtggtgccggagcatcaatgggaaaacgccaaaacaattgattccttttctttttgtttctttcttcttctattggctgggaagctcgctctttttgaattattctatgcaatgtcacctcataagaaaaattgatgagtagctaccatctcaaagcgcaagttggccatattttacacttcgcacacacgcagtcttgtagatacagtcgagacaaaagaccggacactccgccaatgggagtccccaaacgtgatattaaaacaggcacaagcctccaaattattagaaaacttttcatgatttcatcacgcagatatatttaatttacttggataagaggatgacctttattttgacgttaagcaaacaggctcacatcggtccagacgtaaaacacctcacaaacaatatattttataatctattattctgtcattataaattactagcacttttcattcaagaaatatatcttcaaaaagatcagaacatttgattactatcttcctacgctcactggtttaactaaacactaattcctgattacatttatttccttgtaatatttaactgcgtttttatgtaaaaaatgaaatgcactcacaaatcaattacggtgttatgagactaagagagggttttaatttttaaatttaatgataaaatttatgaactaaaattgttcaattaaaaaataattaaacgcatataaaaaatgaagaatccaaaattgcatttaatcatgcttgtattacttactaatattgaatagaagaaacataaaattatgaattgatttctcgatcaatttatgaaggatcctcccgagtcccgattgcaacatgagacagatgcatgttactgaaaataatgggccgggcttcgcatgggatttgggccacacagtaaggacgaggccaagcaaactgcggatcccgacgtcacattctcgttctcgttccatcttaatacgcagaagaggggaaaacagagattttgattacaaggggaaaagaaaggagattctgagactaaaagcaaatcgaagcagagaagaagaaagaaagatggtgaaagtggcgacgtacttcgcgatgacgctgggagccttcgtgttctggcagtccatggacaagctccatgtctggatcgctctccgtcaagacgaaaaggttcattcctttctctcaatttcactctcctccaatgagaaaaacccgagatatcttctaacatatgattattataatttcctacctaactcaatttaactctattttaggattctatttcgtagatacattattttgaacctttcagcaatggttcgtgttatttgatctatctgtgctgtatgcctgtatctctaagtacgaatgctatttgttttgtacttttctttaccctctttctgtatggtaatctgtctcagaaagagagattggagaaggaagcggagatcagaagggttagagaagaattattgcagcagcaggccagtcagaaggattctctttcttgaattcgaatgttgtaattttgctgccttttgctttgtaattttccttgcttttatttttccaatgcaatggtcttgtgctcgaataaattctggtactcccgagcacttcatatttaattgcgtggatttctattgtgttcctctacacatgcacttgtttcataaactgctatgtgtcagtaattgttggaacacttcactcaggttatgatttatgaaccagattttaagcgttttgatgaattgttgcagtcatacttgaaccttttatttttcattgaaagtgtgagatttggaattcaaccatcggatcatgtgttgaagtgactggagtaaaagtctctaaaatctctagttagttgatctgactgtggtgcataactcatttgctgctgttgcttctcctgaataatgaatatagtcttacttgctctacaattccctcattgtttgtggtttattcagatatacaagtataactggacaaattggcctgtttaaaagtaaattgaagagtggagaatcagtatcaaaccattgtcagcagtctttcatcaacctttttctcatacttgtcctacaggatttttgaggttaaattgagccattgaggaattatgaagaagtggcaataccaactggaataagcaagtatcaaaatgatgttttacatgtttaactcttgctaaggtgttgactttattgcaatcataggcaagtgcttggaatacaagtagatgttcttgttagcttttgcagtctatgatagaagattttaaacagaatagtgaatactggggtgccactattgtgctatggctgcgcattgtggctgccagacacttcagggaactcctagctttgggtggatagtggctgaattgcagtagacagcacagctgtaccaataagtggcaaaaatatgattgttccaccttctcttcggatccataatccacttttagggttacttttatgatttcacattctcttcttcaaaaccctgttagttttatgttgacttttgactaaacccagttgctcatcttcatcaatcttcgacccttctattttctggccaaggtcagcacttccgtttgcattctcttctctgttctggcctgcctctgtttacacactttgcaggctattctgtcattcctagtactttttacggaagtgtgcatagtaaaagttgatgactcttgctactgcttagttattagttatgcattacatttatgatgattgtgtgtttaggctacggactaatgatgaatatgtgtttaattttgagtttttttaatttttatatataatttgagtatttatgtatgaactgtgtggcataattgtttgcattctatctattacaaaaaaaacactgaagtagtactttccaaattcaggttttgttaaataatatttgaaattcaatccaacacctgtattgttatgtacgctacaggctataatttaattggactgaattgttactcgtacataagaacttctagaatagagacaccaacttcctctctgtggtatatgtagtcatgagctaattgagtcgtctgcttttctgtcgatggttaatgttatgataaggtaactacatttaaatcacgtatgcagtaagtaattttttttatgtagattttacctattggatggaatcatgtatttgttatggatattcctagtttctgtggtacaagtaaaaataagacgataggttgatttctatggacaggttctattagcattttgccatagaatatttctctctttccctttactagcgatcagtgatagaggcgatactcttctctcgttgtctagtgtatggcaactacctagtgcaaaggtggaatataatggatgtctgatgtctatattgcatgtgtattttagtgctgagaatgtttactctttcgctgcacaagtgaaatattttattgtggtagtgatagtgtgatactccaacacttgtttgtttcattgtatattgcaattacctattgacagtgtgatactctaaacacttgtctactctttcgctgcacaagtgaaatattttattgtggtggtgatagtgtgataccctgacacttgttcgctgcactaggtctatatcacacttagggcatataaaatactctggttgtaattattattgcttcccttgctaggtacttaaagtcttaaattgtagtaatcgatcaggagaataattgctaggtacttaaattgtttattattacctatttctgaatggagtttcaatgggagaccaatttgggaccacttatgatttttaaaatcatttgtttattattgttaattaaaataatattgatattatgaaatacaatgaatgaacgggaaaacatttgtttcttattgttgattaaaatagtgttgatgtttgagatcataagaacacaatggatgaactaaatacataggtcctgaattaggcaatgtggatatttcgattcactttacgaaccaactagacgaaccaagtgatatatgcaatgttgtcaattacagagaaaacaaaaagaagcaaaagtcttaaaatattttgaggttaagaggaagaatatgagagtattttacacataaaattttattaaaagttatataaccaatatgtgtctaatttctgttaaattattaaatggtgtttagcacggagggtctgaatggaatgtgagctaaaaaaattaagggggttttataagttgcaaaaaaaggaggactttcgagtgaaatttggacaaaacaaagggaatagagtgtaatttactttaataataataaagatgatgatgatagaaaaataaacaaaagttattaaatcttgcaataaaattttatgtacgttaaataattttgtgtaattcttttaaaaaatgtaaataaattagaaataatttttaatataacttttaagataattattttaatagtcattagaatgatttgtctttagatgataatgaagaaaattgtcaatggatatattatttattaaaaaactaaaacattcactactatataatgataaaagaaaatataaaagtgaattaaatgacaggaaaaaaaaaagaacagtagtctcattttttaaagcaaatatttaaatttataatataggacaggaataaaacttttattttcgataacaggaataaaaattttaagattaagatattttcttttaatttatatttttgaaagtttatttaaattaaaaactaccgacggtttttttttttcttgatggaggttcgtgtcaaagtaccaggaaacaaaaaaaaagttacaaagcacttagaatatttgttttaggtgggcccccgcaacaagtccttcaaatcgatcaagtaaccccatttgttggtcccaacgaaaaatgaatttgccgtcatgccgtgcaatgcatccatattattgttggattttagaggcaacccaaaaattaatgaattaaaatttaaaatgataaaaataaaaaaacagaaaagaaatactgattcatcatttttattgctgaatatataaatgataaatcagtcataatttagttttttaaaaaataaaagttatgaatccgtaaataataagataattatattctattattaaatttatgagattattttattatattattataatatgtaagtattaatttaataataaaatatattttttaaaactaattaaatattaaatattaatttatcattacacattatgtaattatcataatttatacacatttaataattgatttttttttttgaaagaactaaattgtgattataccaaaatatcatctagctgaaaagaaaacaagagagtctaggagagagagaaggaaagtagttgtttaaagcatgttttggaaacgaacagaatgatgatcgagttaatgggacctgcacctttcagttgagatggatgtagcaatcaccaaccatttcaatttgtctatttccttctttcacttgggagcaaagcctctgtcaccatcacttacaccttcttccttgttccgcttttcacgaccatgatcctctgcttcacgctcactctcggatctcagtcgcagatccaccttcaacgttcaccaccttttcaatctttctcatggatccctctacttctcgtccagctgtagtcatcgataatggctctgggtaccattttcctccatttctatcacccaatctcccttctatgcattatgctattttttctctgtcaatatgtggacaccatgtgtttgttgaaatgctccaatgcggttttcttagttttaggactagaattgtctgtaatattcattgacccgaattcctgaatttggaaatgatgtttttttttttttttgcaggtatactaaaatggggtttgctggtaatgttgagccatgttttaatgttccgacagtggttgcaattaacgagtcttttcttaatcaatcgagaaactcctctaaaggcaattgggttgcccagcacaatgctggcgtaatggcagatcttgatttcttcattggggatgaggcactctccaaatctcgatctagcagcacttataatctcagctacccaattcagcatggccaggttgagaattgggatgccatggagcgcttctggcagcagtgcatattcaactatttgaggtgtgatccagaggatcactattttctcttgacggagagtccattgacttcgcctgagagtcgcgagtatactggggaaatcatgtttgagacttttaacgtacctggactttacattggtgtgaattctgtgcttgctcttgcagctggttacacaacatctaaggttggtaattggtacacagctacactcgaaatttgattttgggaattatgttgaatatagaattggatttggatgattatcttgagtgctttacatatttaatacgatctcagcagcaacacatttggtagttatctaaacacaaaatgcacaggatgcttcatcagcccctgcaatttgacacatttggatgctttcacttgaaaccaagagtgaacaatactgtagaatatgaacagttgtggttgttttgcattattacatgcgcatatgataatttatcagctcccccgattatgttgaatataaaatctagaatacgaagttggttatgcataattttacttgaacttgataacagtaccataggagctatcaagatatttgtttcttattatatctatttttattttaagaatattttcatttatggctgatctgaaattcttcgtagtgcgagatgacaggagttgtagtggatgttggagatggggctgctcatgttgtacccgttgcagacggctatgttattggtagtagcatcaagtcgattcctatttctggaaaggatattactctttttgtgcagcagcttatgcgggtaggaaatccttgtggtataaatttaaaagtttattgtgctgttattgttctcatatttgaatatctgtaaaatttctgtaaacctcttcttgttaatgttgaaggatctcacaaactaccatttacatagctagtgaaatcaatcatgtataaatgctaatcatggatgaacagtgtgtgatgcacttatgatagtattattgtgccgatcaaaaaaaacaatgatagtattattgttacattttttgtagttaataaatagaagtgaaatttacttatttaatttcatgattgagtatgaaacttatttgtgtcttcggctataaatttttgttgaactgactgagattgtaataatccatatccaattgtcaatctgcattttgctaaagtcagattcatgaactgtcttgtgttgacatcgctttgtgcaggaaagaggagagaatgtaccaccagaagactcttttgaagtggcacggaaagtgaaggaaatgtattgctacacctgctctgacattgtgaaggtggtctttagttcaatactttaattctttgacagaatcatttgaggagtttgtcgaatttctctgccaatagttttgttgcctctgccattagcatgtcgagtgtcaataaattctcactactttaaaatgcttttcttttttttgaatcaagggatgtaaataaagttatcttttgaacttgttagttttcctacataacaatgactcattttctctcaggaatttaataagcatgacaaagagccagccaagtatatcaagcactggagaggcattaaaccaaagacgggggcaccgtattcctgtgatattggctatgaacgatttcttggccctgaggtttgttctatggctgctctttatattttctctattatggatagctgaatctctcttagggggcctccagattgttctatggctacttgttttatacctatttttagtatgatttttcctttgtgagtacctgaacctatctcatgaactaatgaattaattaaatatatactcgattagatcctgatttcctatcattaatatccagcttaacagaggggggttatacagaaaagtggtaaaaaaataaaagaggccgaagaactagcgtgggaaggggcaagggaggcttaagtacaagcattgtagactggttggggtttgaatctgggatgaactgatcaagtagtctccatctctaagagtcttcatagcgcttatctatgtatagctattggttccacttgagcttgttccctaaactactgaagaattaatgaaaatatagtagtgccttggtctaattgtggagctaatccatgggttcagtttgggtcattatattaacaggatcagtcatattaacatatctgtatgctttccctatgatttctgcagattttctttaatcccgagatatatggcagtgactttaccacccctttgccagttgtaatagacaagtgcattcagtctgcgccaattgacacaaggaggtcattatacaaggtgaagtacctttacttattgatgtgtatataaataagctccaagagtgcttttaaattttagttaaccaatttttaatataaaattagtgattttcttaggctcaatgttaagcttggggcattttttgttgttggccagatggaatacaatagtgtcaaatgttatatttataagtccacaatcccagccatgatatttaatttctgatcatataaatttcaagtcctttagtttacatgttcttaatgattgaattcttcacctctttcctattttgtcttttttacttcagaatgtagtgttgtctggaggttcaaccatgttcaaggattttcacaggaggttgcaacgtgatctaaaaaaaatagtggatgctcgtgtccttttatctgaagcacgtttgaatggggagataaaagtaagagttaatagatacctttagatcatatttacatagatgattctcttcctctcacacacagacagatactaaattctttataatttatataaaccttgcttgcactagttgtatggactaaaccaatcaacaaccaatacatcattatgttgtattaaataattacataaatccttgtcatgtaattattttccattgaaattagcgatgtgttggttgttaattgtattttggaaggtcagactgctatatatttattgctttggcctggtatttacttttttatgtttggaacctacagtcgcagccagtggaggtaaatgtactcagcaatccaatccagagatttgcagtttggtttggaggatcagtgcttgcgtcaacacctgaattttttacggtatgattgaataaatggtattgtttgccaagtttagaaatatagaacttgaccagtgcaaaatatgaccgagtttttttattttttcatccctgtggactgcaatgtgttttcttgtgataatgtcattctccttgggagtgtcgataatttctgaatgcttcttttaatccttccaataaatctcgatgcaagttttacaatttctggtccaacgtgcaggcttgtcatacaaaggcagaatatgaggagtatggagcaagcatttgccggacaaatcctgttttcaagggaatgtattaaatcaacaacatattagttgattatcgatgcagttatttggtaagactgttgaatgaaacagctggttatcgttatcctcaattcacttcctgggctttcttcccacctatattcagggtggcagaagtgagtgtaaaatatgtgtattaagtgaaaatatgcgtttgtttttattccatcacttggccgtcagtttcacaaggttaatacagttgccagcagatccagacggtacttaatggtttgatagaatttgatctttgacaaagctggttgagctgaattgctacttttgaggttcagcttagagtttgatgaagttctgcattttttgtcgttcattgatgggactgataataccatgaagtacttttctaggcagtaagttaaattcattttgattgaattgtaataagcagcagtgcaggttagatttatgtttacgctaaatcgtgattcatatatttttgcatttttggttacataatgtataattgtattttgtttacttattatcaaagccagaaataattcttttgccacattggaatttgaaatcattctcccaacatttataatataataatagctatttttctttctggtagcacattgacccgttggtgaaagtggctgaaggcctagccatttgaatttgctattcttttaccctttttgttgccggtaaaaatgattcccatttcaattcaaataataattcttttttttacagcaataataattccttgtcagtatcgaataaatatcttaattaataggtatttataataataatagatgattaaaacaaattaatcaaaattatcatgcatttttttaaaaattcatctaactttttcatacgaatctatgattttaatagaaattgacctcaaatgtcttgatatgtaaggtgtgttcttctccttggaatatttaattcatgtgtgtacaatgatatctaaaataaaaagaagtttgaagttgttcgtatagttctttctcatcgatgagaatattataaataaaataatcattttgaatttgttttcctcaaaagaccactaaattatttatcaaaatcagttaaatcaaatacttcatgataatattttctagaaatctgtcagggagcctcaatgtctctttacaacgcaataaaattttcattttataacattatatttatacatattcttttattttgagaaaaaatagagatgccctttttgttaataatctgagatgcatttgaaaaattaactaaacctttggataacattttaataattgagaaataactctaaaccctaaatcttattgaaagtcataaaataatcacgtgttattataattcataaaataactctaaaccctaaactatctcaattttagacaattttgtttatcttgcctatgaagctttataataaagtttaaacattcattacaggtgaacttcaataattaataactgataagtgatacataacaaatcaagtatacagtgataggttggcataactaatctaggttatttcccgggtcttctttatcacaagaaataattataaatctttcgataacattttaatatatttttttacatcacatatattttagacttttagttgatccttttcaagctagataagtccgtgtatgactgaaaaaattctttccaaatatttaatataattgaatagttaatatttaaattgaaaagtttcaatttataagttgaaataatctcacatcttgcgtgcttgccacctcggtgaaataacattttaatattaactcttctgtatattgaattacaatatacttaaatacacttatatatttgcatgcactatctttgcatgattgcatgcaaccttcggagcggcgatgatgagaactcagaagtagaagaagccggcaagagcagcagaggcagctccggcgacggcggagaggtgaccgagggaggaagaggcagcggcgctggaaggagaaccacccttagcattgtcgaaagcaccgggaggcacgggcccaccaatgggtgcagccacgacgctgttgggagcagaagccgcttcactggatagggctccgatggagtaatcatcgtcctcatagtcatcggcagaggcctctggtgctggtgctggattcttagcacaggccaagccaatgatggcgaacatcaccacggcaagaaccacaaaacggcgtgcacgtgccattttttaagaaaaataattaattaatttgttgatttgttttgcagattttctctaaggaaggggaaatattagagaaactctgcaatgcaaggaatatattgtggttgcggaaaggtcgtaaggagagggttcatatattatagggtacgtttgctattaatgtgtgagggaagccgttggttacggttttttgctatttaaggtaaggaatatatatactatatatgggaatgtgatgatctctgcatggaagagggaaacaacacaacaacgttgttggatttgtttgtttgttaaggttgttctatatttatggtgtgccaaataaatctttattccctttcaagaatgtgacattgcaagttgcaacaatggcaaagaatattataggggacatcgatccttgctggccgttcataaattagcatgttttttttctggggtgtataaatatcttttgaattttaagtcaattctacaaataaaaataatcaatatttttattttgttgttagacgatgaggattaattaattaaagagataagattttaaaaagaatttaatttcaatacactttcaacatgaaattgaaaagactttttaccttgtaaatgaataaaaaatcaaagagtatttttaaaattattattataaaagtcaaacatccttattatataaaataatttataattaaataactcttaaaaaaatagttatattatttgttcattctgattaaattctttttaaaatgaaaataatattatagaaatgaatgatttgaatcaaaaaatatttatagatataatatgttaaattaaaaaattaagtttgaattaagattataataattttacaatttatccaaaaatatattatcttttatatatatgacttattagaattcaaataaaatattccatgttggaaaggtcacgtggtttaatcaggaagtatttttatgtaaaagtaagaattctaatttataataaagaagagaaataaaataataaactaataacgaaatttatatagggatatattacttgtatttaacaattttaaccttcttttttttcctgattgacacacacgaggaaaaggattaattactacaaaatttaattttacttccctccatgtattaaataacagaatttttccttcattcatacgaaagtgtgtggataaatctgtaaagttattctaatttaattaataatttctaagttaaatcctaaaaaattattattcataatgattctactttttttaatagtattcttttgaaaatatacgattctatttgacttcaatgtaattgtttcttatgaaatcaaagatatatgtaattcataaaagaatccttagtaggaaatgaagtactctgttgatctgccatattttttacaatgaaatttttacagaaactttaataaattttttattttattttgaaaagttattaatagttttttaaaaaattaagtttcattttaatatttaaatttttgtataaattaacttcgttttaataaaaggagaaaacagtgctttgctttactaaaaaggttattagttggtaaaggacatcataaaaacgttattattaattttattttaggttaaaatcattttatatatatatatatatatgagggattaaatcacatataactttaaaaattattatatcattttataacttttaactttataatataatcttaaaactcattgttggattcaaaatttattttacataaattccatacaaaattttatattaattaaaaattatttgcgttcatgtaaactaaaatcgacttaacataaatattttaaaatagatcatttttagttgttcaattatgacaaaatttaatagaaataatcttgataatatgtagatataattcaataatttattcaataaaaatcacattttatatcaaattataaaaattgtgtaataattacacgatataattaatttaatccttcatatatatatttaaattttttaaaaacacaccatatgaactaataaacatataatctatttcacaaattattccataattcataacaagttatttacagattaatatgcaagaaatattttttcaatcttacataattcataaatacataagcagcattaattactcctatgaaaatccttagcagtctaaagttcaagttgaccattaactttttcccttgattcttcaatcaaaactagataatctacaaaaattatgcaataagtcataatcttttatacgcgttgtacttcccaaactaaattaaacaagcaaaaagactaaggttgtgaggtctaatgtaattttatccttctagaaaagtccttagtcttgcctctaaaagttctcacattaataataaccctatcatatatacatgtcttgtgtagcttagatatatatacctcacagtaacacctttcttaaaatctcacaatacttccttagacacttaataatatatttcaaatcaataaaaatgatatgcaaatctttctttgctttaatacatttccatcagcccccataaaatataagcgacttctatcataaacctttctagttcctagtataaaatcaaataaattcttcgcaattctaattttttcttcatgctcaattacctattttttcacaatttcataatgtgactcgtaattttttcttcttttaatatgcacaattttaaacatctccattgtttttaaataaaggaaaagtgctcctcttcgactttaataaaagtttactaaatcgagccgtggtgatatcgagtgaatgacaattctgtaaaattcaccaaatttatctaagcaaatgatcctaggataaccaaattcaaaagtcaaggcaactaaactgcatatgaaccttcaccattttcaactatgatgatctatttgaagtctacgttgatatcaacaaccgcacaaatagtgaagctcttgttatatgttgccaagcttggacctatcgatgcattctttggttctatttacataataaacaaaggattaaaacactaaatgctatgcatggtaagcataaattaaaggatgacatggtgtaaataattggcatacaccggcacatagttaacaaagatcaatatcaacccgctttggctttcctcttccagtgtggtaggcagcatcaatctctacacctagttgtcctttgtccccagccccaaaggcatatagcttccctgattcagttagggcaagtgtatgagcattccatatggaattggtcgtactaacctgtaccacccgttcatagttctgtttcatcgaagtgactagctttggagttaacacagacattgtatgcatggcttcctgcacaagtacatacatgatattgttgattaacttcatttttattaggattttctgaatgaacaattttgtctccaaaagtatctaactaataattgacatggaaagattaaccttaataaaatgaatgcactagagtcaccaatataaaattaggtttgtgctacttgtgccctgtctctaaggcatttacaagaaatgtcatctacggttcactatgcttcaactagaagcttcattctgaaactggttcagtttggaactcctctgaaagttccaattattgtaaagtagtaatcaataaccagttcatcatatcataattgttaaaaaatcagcggaaggacgtgtcctttgaaccaaaccaaacaagcaattcacaaatcaaacaaggagcaaggcataagcaagtagacctgctcaggattttcagggtcatggccaagtctgccagtttctccacagccaaatgaatacacatcaccgctatcagacactacaaaagtagtgtaatctcctgtagcaacatgaactgctttgacatttttcagctcttccaccaccttaggtactgattcacattctttatttccatgacccaagcagccataacggccccaaccccaggtgcaaacacggccatcctgccccaccacagctgcatgccaagaaccagcagcaatcaccatgggctgaaggtttaacaactggaattgttcaatcaaacgaggatacttctcatccgtttttgtgccatgtccgagcttcccacccataccacacccaactgagtacactgacctattaagatttcagagaaggatcacgtaatcaataaacgtatagatagttattacaacaaaaatgaaatcgaatgtaaatactagtttatttaagaataaaaaatcagcaatgcttaaaaactttcataaatcttgaagccgtggacttatgatgcaaatacatgtaggtaattgaagaaaacagaatggaagatatatatgatgccaatcaaggaataaatcataatacaaaaaagttctcttttcactctacaaacattaatatgcatacaaaaaaatgaagtatgtaaaagtgcctaatttgcatcatatgatataactcccaattcaattattgtggaaaaagaattgaaaaagttgagataagaagattaagttgtagctcacattccacttggttgacaagccaaacaaagcaggtaacagaatccagcagctatttgcactactggtatgtgttccagagctcctaataaaggatggggttccaaatcatctggatcagtttggtgacagagtttgccatcaccaccccaagaaaatgtatatacccttccttctcttgacaatacggctgtgaaatagtttccaattgcagcttgcacaacaaatatatttttcatagattcaactaactgtggagttgtaactattttagatacttggtttccatactcagcttcaccaaaagattgttttccaaaggcataaacctgcccagaatcactaatcaacattgtcctcccagtcgcagcagtggcttgtataattcggattccttgcaaagctctgcagcgtaattgagttatgttaacttaaattcaactagttcactttccacttaaattagtatgataatgtattaactaaagttccaacctgattggccgaggttgccatacatcttcagtagtgccatgcccaagttgtcctgaactattggacccaaatgaataagcaaccccttttgatgtcacagcaatgctatgaccggggcctgctattacttgtgatttctcccttctaccacatgcttctccagcaagcaaaaacctcagaaccaatttccaagaaccgccacatctttgcttcaaatgttgccgttgttctgttgtcattggattaaaaatggctttcttctggcacatgtccaatgcagcaagctctgacaaggacaagttgaaatcaggaacaaagtttgccggctgcttgaaaaaggagcatgttgcctgcaaaacaccacatcagaaatgaaaccagcagtattagaattagtacaagtttcaattaacaacttaagagctgaaatggatacaagcacagcacttgcctcaagtttagcaaggtcttgaggatacaagttacatgttgtaaggacatgaaggacaatggaggggttcgcagacaagggaaactctcctggactagaatccccgaagcaatggcgttgctgccgttgaaatgttggcaattgggtggcaacaatggtagtagctggctgatcagggatgttatgatattggatagttggggtttcaccggtagtggcatccattggcactgcgaatcttatacagtgcccacacagagcagaagagaggatctagcacttctggtaattatgaaaatatgtgcaaacggattactgcattaataaattaatttctgtttctccaactaaagcatctgaaactctacaagttagtacctcaagaatatgtgacatagttttttgtttttttttaaacacaggttaattacatgattttctgtatccatttacaatggcattataaatcaaagacaaaggcaaatatttagtgatgaaactgaggatcatcgcaaaaagattttacttttcataaataccaaactaaaaaaaatctaaagcagacattttattgattaagggtgaaccatatgaagaaaattgaggatggaaataaggtgaaggaatccaaagaagaaaacttaaagtacattattcccagatgatgggatattctacaatcacacacacaaaaaaaaggaaagaatttcctgatcaaagttgaagaaatcgccaccaccaaaggttgatcatcccaatcaaaatgaatcaaattacaaaataccctctttcatacagaaaccaaaaatccttttttcgactttcccagatcacgttggatggatacgcaactataaaaaatggtaaagcaaaaaaattgaaaaaaaaaaaaaagaatcaggataaggggaaaataagacatgataaaagagttttggttgaatggcattcgttgcgatctcctcaaaacataggcaggcacgtggaagccgtgattacatatgagagggatcaaaccaccattcctcaaactgagtatttacctggagagagtttgccaagttattattttaatgaaagtgtgcatataatgaaatgacgtagcggtgagagttttatatagcttttgggagtgtgtggttgaatgaataattttttttcaaataggatgatatctcttctctttcatatttgacaagagattatttataattatatattagataagatatgtattcaggtattcaaaataattcgaaatgttagttttaatcttaagtttaataagtatgtctttgataaatagcattacttacaattaaactaaattcttttaaactatcaaacagatccaaataaatcgaaatcgatcaaaccaacaataaaacaatttgaaaactgaaaaactcaaatttgctgttatgatttttttttaaatcaataaacacatggaggaagagtataagatggttgcaaaaattttaattaggttggcaacacatcaaccaccctctccaaaccacctgcaaataagggagttattatgacttggttcgaattattattatcaaaatcctaccacattgtacattattatttgaatttttattttaaatatatttttaattgctcaaattaaatatattttttcctctaaattttaaattgatcattgtaatttgaaaatttgaatacatattatatcttaatttatcttataatttaattattatcttatcttacatattttatcatataacagtaaatagaatacatatattttatcttatcttatacacatatttaattcttattttctatttactgttatacaattcaacttttggttatatatatatatatatatatatatatatattaaattttaaatttatatgagacataaataggtgtattaaaatatgaatttgagaaattgatttaatcgaagtttgtaattttaaattgatcattgtaatttgaaaatttgaatatatattttatcttaacttatcttataattctattattatcttatcttatacatattttatcttataacagtaaataaaatacataaaattttatcttatcttatacaaatatatttaattcttatttttttatttactgttatacaatttaacttttcgttatatatatatatatatatattaaatttgaaatttatataagacataagtaggtttgttgaaatatgaatttgaaaattgatttaatggaagtttgtaattttaaattgatcattgtaatttgaaaaattgaatacatattttatcttatcttatgattctattatcatcttatcttatacatattttatcatataacaggaaatagaatacacagaattttatcttatcttatacaaacatatttaattcttgttttttttaatttattataataactaaggtttcaaaaaaaaaaaatctggcaccattagtactagagtgacgtgattagagtcagatatattggaagttggcacggttaccgtcagaagtactccagaaagcatgtttttctctggaacttggtgtgaatagcgccagagtagcacgatcagcgctaggacacgatctagaccactatataaggtcatttcacgcgtttttggggaccaaaaacctatcttcttcctccccactacgttttcctccattaaagagcttgagaagctccagaccactcaaccattgaccaaaacacttcacacccaacatgaaacttgtaggaaatcatcctatgagctagaatccttcatcactttttcctaaaaaccatcaaacagagatatcattttctctagtggagaagttgtccactagccttccttgtcgatttagaggtaggaaacacaaattctaccaattatttaagaatttgttcttgaggtgaatagtatctcattggagttagagttgcaattaagcttgagttctttataaaagtatgcttaggaggttgttgtaatgaagatttaactttaaaatattgattttatggactttagaatttggctctgagaaatgtatgtgtaggaagaatgttagttaaattggtgattgtatgacatgcatgagccctgatgtttgtacaatatgtgctcaaggggctatataaacagtaaaattgtgttgaagtaaccgttttagccatattgttaatccttgggttttggcctgtatagtgttgaattctctgaattggttgatgcagagtctttgggagactctagtgacttggttaggccgagatagatcctgctgagggtatgtgagttgacttttaggtggttagttctgataaccttaaggtagaggactaagaggtttaaatggaaaagaataatgtttcttttcattctaatggttgagaaccgttattgattgtttgtatgccttcatgtagggcgtgatacggatactactggtggttatgaccatgaagccaagaaagctgatatagcgctgagagcaggtaagttctttcttcttgggagtgtttcctattgactgtgttccaccatactccgagggagtgctggttattgtatgtcatgatgcatgtgtattgaaattgtgtgttactgcttttattgagaacatgtatatgatgtacactgtgatggtatgttatgtgattgatgagattctctgaccagtagaatagattacttatggacttcctttagaaatgtgtccttaagtggatgatctttccttggaagtgtcatacatgtccaagtaagtcatgagagaatgtgtccttcagtggatgatctttctcaagcattggtatgaagtcctgagggaatgtgtccttcagtggatgatcttcctcaggcaatgtgtgcagagtcctgagagaatgtgcccttaagtagattgtctttctcagataatgatgcgaaaagtcctgagagaatgtgtcgttcagtgaataatctttcttaggcaatgttatatatttgtatatatattgttacacctgtgttgtgatatacatgtgatatgcttcatgagagtcgtgatggcttgttgtgtgatatgtcaattttaatactgtgtcatggaagtgaactagggggagaaaaacctccaaaaatcctgattttactgagatttgcatctcaccccgtgtgtggggattatgttttacaggtgatgctcagcgagcagatggtggatctcagggcaagaggcccgagctctggtatggttctgtgggaaccttaggcatatattttgagaacatgatgactcttttctgttggttatgcttgtattttgtacccctgaggggaggatgcatagttagtgtgttttttgtatatctgagagatcgatgtatgtaaagaggatagggtatatgataccttattttttaccgccattattttgatacataatataaaaatgttattgtgatgacgtcactttatttatcgcttccgaattgattaataataattaattgttgcgcttaagaccataaataaatgttaatgagccggatacatacgggtcattacatttactattatacaattcaacctttcgtgttatatatatatatatatatatatatatatatattaaattgtaaatttatataagacataagtaggtgtgttaaaatatgaatttgaaaaattaattttatcgaaattatacattttttaagatattactattttataattatcatatttaaatattattaaatagaaatagaaaaactaataaaataaaaaataatgcagtattcatttaaaaattaatattctatttttaaaaatattttttaaattttactttcttattaattcgttaatttattcccgttaacaacatgccatatgatgtctgtttattaattaatttttaatttaaaattacctttttccaatcacacactcaaaaaacttagtatcgtctctaaactctgatattaatattaaaaaaacttttttttgcttaatatctacaaataaatcctgcacaatgataactttattcggtattatttgaaattctttcaaataacgacgattcatcaatattttttaaattaattttaaataagttaaaaaaatttagttttctttattagcataattatatgaacacatttggaaaaaaattgtaataaatttgatgttcatattttctttatatttggtgatttaaataaaaatgttccaataattattttaaataatatacttattttcaatgtatatgtctacacaaattagtccttaaaatattagaactaatttgtgcatgcccattttgggtatatatttaatattttcatgtattaaatataattaattaaaataaatattctctattttacaaatataattaatcattttacaagaccataaatttatttttgagtatgcaacatatgttcaattaaaaatataatcaatcggttttcttaattttgatatgattatatttaatatagtattacgaattaaattttatttatgtacatttatttttataatgatgaataaaaatataaaataattatttatatgaacttgtgcagtccatggttttaaaatctagcataataagtatgattcattgaatataaattaattttaattcctaaaagaatgagatttttgatattttagtttctaaaatttaaaaaaatgcatcaaattattcacatcattaagtttagttcactactattaacatttttgtttgtgtgacaagttttatgcacgtatggatgacacttaggtacaatatctcataacttttacatgactatcacaagttagacaattgactatttaatttaatttatgaacttaattacttttattttggttcatgaacttaactacttactaacattttggtctcttaatttaatcacttatttttattttgttctttaaaagtacttttgaattttcaattaaatattatgttacatataagttattaacttaatcatcaccatatccctactttcattcattatcactcatatttttcaacttttttttcgcacttcatattgactttcacctccatcaactgcatgacaagcttgatatttattcaattgaaacatttaaaaaaacattgactagcttctttaaaaaattacattttattcaattattttttttcaaatatcttctttaacactctcaaataactattacattcaaattattttgtgtctatatataacttgcagtagtagttaatcaaactaacaactttcgttgtttgcattttctgctttgcttaatccttttatttttccttcatttgtaatttttaaatatttaacttttaataagtaatattttttttttatttttctactatttttacacataaaaattgaaactaattcttattttaaatgataataacattaacggttatcatccttgagttctagtcttgattaaaatactagtttttacaattcatatgttgtgatttgcatataccacaccaattcattatatatagatgatgagattccattgatgcagagttactccttttttcttctttgatagatgatcataattttttctaagttcgactactactaagaggtctaccaaagattagaaattatcctcgctaacaatcacatggatcttgtgtcaccccttccttcaacttacacctccctcatgctaaaaaagtttcctccacaacttttcaaatgtcataaaacaatggaaatcatcactgctttgcatgccactagagggtcatgggttcacacacccctaatatcagagacccttgaacaatgatgtaaaaatcacaaagaatgaaaaaaaataggaaatacttataacacattcatttttctttcttctatgattcttaagttttttaattatttttttcatgattagtgttatttcataaaatagattaattatttaacttattctttttgcttcgaaaaaaatgattattctaacattctgcacatttaatggcatataagttttagaagcttggtttgggtagaagattgagttttaaatcttctagaatcttgttaatggtatcttgaatttaactgttaactattcctatgtaattgctcataaataagtttcatagttataatataatttgctgaatctcataagaggaaggtgaaaaccataaggataaagaatgaaagtgagaagatatggtgatatatatgcaaataatttcatatgaaagttaaatcaaaatttgaaaaaaaatttaaggacttaaatgagagttagtaattaagttcagaaactaaaaaatatcaataactaattaagtttaaagacaaaaatgataataaatatttaaatttagagactaaattaaaaagtcaattttttaaaatatgacaattgacacctaccaactattatctgtcacttatcatttacatgtgaacaaaatatgtcacataaataaaaacattaacattaacacactaaactcaatggtagggttatttgataattttttttaagaaactaaaatgtgaacctcccattttttggaactaaactaaatatttagccattgaatttttcattttctcaacaatactctgattcatatgaaaggtacttaaaatcgtgtacttgggcaccacctcattccaagtacatcagttgcaatttccttttgttacatttagtcatcccaaattgtttgctgaataaaatttaacactctcctcttattcgtctcatcgcataatataggctacaaaaaaagtctatttaaaaccctttttaattgtaaacacaggaaaattaaaagaggagggaagagaacaaatttacaggcgagagaagagatcctttttagtataagtaaaagttatctcaatatatattaaaacttatatgtcacgtgttggttggccagtattataatttttttttttacttctctcttaaactctttatctttttgtttttatctgtacttgtttttttttttttttttatcgctgcaacctagttaatattaataattaaataaagatttgtcaactcaatgaattcaatttaattgataacacatattaaatctgtgaaggataccctgagtttgatgtgcattgataatttatgaatttacagtataacctttcctcttaatatatgtatactctaaggaacacgaaaaaaaaaaaacattctcattgtagatgctttcatcttaaaagtacaacaaacattttcatttttcctataaacgacgtgtcgttgcatcactgtaaaacgcgtgtttgggacaaacaggtcacgaacaaaaacaagaaaatattggcatttgagcagcgcaagtgatgataagaaacgcaagaaatatgaggtcgaaatctgatatatcccccaattcgcataagagaagaatctagaaaccacaatcccattggacctcgtttctccaacgtggctttttccaaacgctaaattgctattcccacaatcagagccacgttccccatctctgccactgccatcactcactaccttcttctctgttctcaccaatggcatcaacaatatcagcaatggccatgatcaacgccaaatgcgtcaacctaaagttccccaatccgacgaagctcgcaccatcaaaaccctcccttcagatcaaccttccaaagggcctcatagcctcacccgaaagcactaaactttccactgcgacagcaatggcaggggcaatattcacaaccctcggaacctgcgacgccgctttcgctgttcaacaaatagccgacatagcagaaggcgacaaccgaggactggcactgttgctgcccataatcccagcaatagggtgggttctgttcaacattctgcagccggcgctgaaccagctgaaccgcatgcgcagcaccaaaggcgtgatcattggcttggggcttggcggcttggctgggttggtggctgcgccgcatgcatcggcggcggcttctgaagctgctgctgctgcgagcgacaacaggggacagcttcttctgtttgtggttacgccggctattgcttgggtgctttacaacatcttgcagcctgctctcaaccagctcaacaggatgagatcacagtgatttgatctttgtgaagtttaaaattgggaaggggcttaaatgctgtgggatatcaattatcatcatactaatagttttcatgcaacttgtatctaatgctatatccgctttctttttattattttccattcccaagcaagccagtggtttcttttttgttgcaactgttgtgtgtaccttcccttttgcgatttttagatctgattgattgagttcaagtttgtactttctttctgttgttgaatctacaaataagctccatgcagttttgaaaggttgattaattgttgccttgcacctgctgggctttgcaacggaaagagaaagagaaatgtttttttttttttaactctaatcctcacttgttttccatttttactcagttttgttttgttcggtttcaaaaatcataatttatatacagaacgaacataataaattatgaagtatgaataaaattcttagaatttcaatttagaagttaattcagcctcataaaatcaacttttatgacgaagatcgaccaagttttataagttcaatctctttaaactatatttctagctgtgtggaactaaaccactgttttaattaaggtagttaatgaagaggtcacaactaaggtggattagaaatgagtgcaattaaggtgacattctaacactttttctcaaagactacttgtctagagtgtaacaaatgcagattgggtttaaagacctaattcaacttaaaaaaatgacccttcaaattaggactatgcaagttttataggctctatttaaaaccatatcactgattaacatgggattaaatcaacactttagaggatgcaattacaattagttgatgcgaagtttaaattagggattaaaaacagaaatccgaaaaaaaatttagtgactaataaactcaaaatcttaaaataatattaattcctaatttaagaaaaaccctcatctcttcccacataaattcaaaataattctctaattaaaaatttaaaataaaaaatacaattaacaaactatatcaaaattgagataatttggacacgttatgagatgctcaatgaatgcttcagtaagaacaaaaatttgttatcaagagctcgacatacagataaataaaggtaaaactaaacttatatgagaaaaggtagttaaacaagacctaatggagtaagatatagattgacagacggtatattttaggacgaaatggagaaaaattgtaagtttggtagatgattaaatccattattaattatatatttcaattatttccttgtgttagttcttttcttatttatatttttttcttctcctctctttttctctttttgtttcattttcgatctatctttgaattcatctaccaccaactctaattaacttagattaaaggtgttgttgatgttcaaaagactatgtcaaaacatattcatttataaccaatatatccaaaataattgtaaaacttactatggcaagtttgagaaaagaggtgtttaccacttgaagaccacctaaagttatagagcaaaattttggctatatttacacgcaaaatattcttaaatataatttgtattaaaatattttggatgttgctagtttcgaaccgatgacttgaggcttgaaatttaaactggaaacgaacaaataacttgggaaaccaacgtcttcattataatgtcgtgccaaatattatacacatttaataactatgaaataattaaatgaatcccaataataataaaagatctcacaaaaatctataaatcttctctctagaatgcatataataatgtttaaggtcttatttatagagtttcctcatttatttattatatatatctaataaaaaacaattttattcaaatcaaaatataatcattataaactataaaattatccttttaattatttaacacaattctatatctaaatttgcatatattatttatttgaatgaactattacttctcttataatttaaatattttcttttaatatatatatatatataatttatacttatttaaattaaaaactaccgacagtttttttcaacagaggttcatgaattcatcgtactagggtctagggcaggcagcaagaaagaaaaaggttggcgtgtaagaaagaaatgaaacaagttaaatatctgtgttgtgtgcgtctctgcaaccggtgcttgaaatcaaacggcttagtctgataaagcatcccccatttcttcgtaccataccaacacgccaacaacgacaattgtagttgccgtcattagtactatagttataattaattaaatataaataaaagaaagagagagaagagaagagaagagtcgttgtttggttgccaaggaaagcatctctgagaaacgaacagaatgatgatcgactaaatgggacctgcacttccacttccactcgctgtgttcaaatggctttagcaacaacaatcaccaaccattcccatttgtcttttactatcttctttcactttggatcaaagtctgcgtcaccatcatctttactctcacctacaccactttcttcttcctcttcctcctcctccttcttgcgcttctcacagcgctctttactgccatgaacctctgcctcacgctcgctctcggatctcagtcgcagatccaccttcagcgttcaccatcactaccactactaattcgctttttctcatggacccatccacttctcgtccagctgtagtcatcgataatggctccgggtacccttttcatccatttctatcacccactttctcttttagctttatgtggtattttttttcttatgtggtgtggacaccatgtgtttgttgaatgccccactggtgttagttttataactagaattatctttaatgttgattgacctgaattgggtttactctgaatttggaaaatgatgttttctttgcaggtatacgaagatggggtttgctggtaacgttgagccttgttttattgctccgacagttgttgcagttaatgagtcgtttctgaatcaatcgaggggctcttctaaaggcaattgggtggcccagcacaatgctggagttatggcggatcttgatttcttcattggggatgaagcacttaccaagtctcgatctagtagcacttacaatctcagctacccaattcggcatggccaggttgagaattgggatgccatggagcgcttctggcagcagtgcattttcaattatttgaggtgcgatccggaggatcactatttcctcttgaacgagagtccattgactccgcctgagagtcgcgagtatactggggagatcatgtttgagacttttaatgtgcctggactttacattggtgtgaattctgtgcttgctcttgcagctggatacacaacatccaaggttggtaatcgttagacccgaaaaagattggcaattatgttgaatatagaattggatttggatgattaatcttgaatgctgtgcatattaattatggtctcagcagcaacaagtttggtagctatctaaacacaaaatgcactggatgtttcatcagcccctgcaattcgatacttttggatactttcacttgaaaccaaaagtaagccgtactgtagaatatgaatgaactgttgaggtggttttgcattattactagtgcataggacaattcttcagctcctctcattatgttaaatataaaatgttaagctgactctgcataattatacttgactttgataactgtaacacctcaaactaacatgaggcttttcaatgtgttttgttctcacacgttttccgagaaattttccagaaggtcatctatttcataattgctccaagtcaagcatacttaattgtgaagttcctatatgatggactaccgaaaagtagatgcatcttgttggtaagatagtaccaattaattccttcaagtcatcctcaattgtatagtctcatacctacccaacctttgaatccttctcattctggtgtgcttctattggggtattacaataacaataccataagagctatggagatattttgtttcttgttatatctgtcttattttaagaatattttccttttaggatgatctggaattcttcttagtgtgaaatgacaggagttgtagtggatgttggagatggggctactcatgttgtacctattgcagatggctatgttattgggagtagcatcaaatcgattcccattgctggaaaggatgttactctttttgttcaacagcttatgcgggtgggtaatccttctggtataaaattaaaaggttattgtgcctgtattgttcccatatttgaatatctgtgaatttttgtaaacctctttttaatgttgaaagatatcataaattaccatttacactagctagtgaaaccaatgtgtaaatgctaatctggatgaatagggtgtgatgcacttatgatggtatttttgttacatttttaatagttaataaataaaaaagtgaagtttacttatttcatgattgattatgaaacttattcgtgtatttagctatatatttttttgttgaactgtctgagattgtaataatccacatccaattgtcaaactgcattttgctaagctagattgacaaactgttgtgttgacattgcttcgtgcaggaaagaggagaaaatgtaccaccagaagactcttttgaagtggcacggaaagtgaaggaaatgtattgctacacttgctctgacattgtgaaggttgtctttatttcaatactcagttctttgacagaattatttgaggagtttgtggtgcgcctctgccaatagttttgttgcctctgccatttgcatgtctaatgtcaataaatactttaattttctctttttgtgaatcaagggatgtaactcaagtgatcttttaaactttttagttttcctacataacattagctcaatttctctcaggaatttaataagcatgacaaagaaccaggcaagtacatcaagcattggagagctattaaaccaaagacgggggcaccatattcatgtgatattggttatgaacgatttcttggccctgaggtttgttctatggccactgtttagattttctctattatggaatccacttgagttttttaactattgaataattcatgaaactgtagtagtgccttggtgtaattcctgagctaatctataggttcagttggggtcattatatcaataggaccagccaatttaacatatctgtatgttttcccaatgatttctgcagactttctttaatcctgagatatatagcagtgactttactacccctttgccagttgtaatagacaaatgcattcagtctgcgccaattgacacaaggagatcattatacaaggtgaagtactttactgacatgtatatattaataatccccaggagtgcttttaaatttgagtgaaccatcacttccaatcataaaattagggatcttccaaggttcaatgttaagcttgaggcgttttttcttgttggcccagatggagtacattagtgtcaagtgttatattagtccatcagtccagccacgatattttattttttatcatatgaatttcaagccctttagtttacttgttcttaatgattgatctctttatctcttgcctattttgtattttttatttcagaatatcgtgttgtctggaggtacaaccatgttcaaggattttcacaggaggttgcaacgtgatcttaaaaaaatagtggatgctcgtgtcctttcgtctgaagcacgcttaaatggggagataaaagtaagttaataggcacctttaaaccatctttaaacttatcattctctccctcgcttacacacatggatgagaaattcttatgtaaatctgtttgcacaagttgtatggattaaaccaatcaaaaatcaatacatcattatgttgtattaaataattacataaattattttgtcacataattattttacgttgaaaacagtgttatgctggttgttgattggtttggttatgtaatttatggctcaatacatcaacatcaacaacatctttaacccaagttaattgggatcagtgatagatgaacccaatgatagatacgaggaggttgaaaaaaaaagggtaaaagcaaagaagagggaaagaagaagggggagatgaagagaaaaataactaaaatagaaccatctggaacatagagataataacgggtctaaccctccaccaagtttataacttttctctattatgttctaagacacatcgtccgccaatctatatcccactctattaagtctagtttaactacctttccctaggtaagtttcggtctacctctacctctctttgtgtcaaactcttggtaacaaactttaattctcattagagcattcaagggccgtctcattacgtgcctaaatcacctcaatctatgttctctcatcttttcactcattggtactactgctaccttttgtcaaatatcttcatttcttatcttatccatctttgtataatcacatatccaccttaacatcctcatttctgctactcctattttatgctcatgttgtctatgtattgaccaacattcagctctatataacattacaggtcttatagttgttctatagaatttttcttttagcttaaggagaattttgtggtcatacaacaacccagatgcacttcgtcatttcatccaccctgctctaattctatgatttacattctcatcattctctccacctttttacaaatttgatcccaagtatctaaaaacatttttcttgggtacctcttgaccaaatagatgcatgaagttttgatcattatcttttaccaatgaaaactcacatttcatatactcggtcttgctttgacttaacgtgaattctttagacttcaaagtgtttcttcacaattcaagtttcctattaacatcggcttaacttttggtccaacacatgcatgaacaaaattgtccccttgatatagttatggcaggctgtactgctatatatatttattgctttggtcttgcattaactttttttacttcattaatttggagcctacagtcacagccagtggaggtaaatgtactcagccatccaatccagagatttgcagtttggtttggaggatcagtacttgcatcaacacctgaattttttacggtatgcatttccagcattttttggggggttatgaggttcaatgcgtgcatcctataatcactaattttgtgtactaatagtgtgttcttccatgtaattggaaagggggtgggggttgggggtacctgttcaatgattaacattcttccttgctatgacttataagttataagtaccataccctgaaaaaaaaaaaaaaaaactctcttttgatcttgagcacattggtctgagacaatttgttgaatggtatccttccctcttatcttcgcatatctttaggcaatgaggtacgtagttttttttatgtttggatttataggtttgagatgtacttttatttgttgacaataaatcttagattatttcttgtgcatgagaattgagaaagcagtgatggatggattgcatgtcaatgtcacatttgtaattggttgtcgatgcctcttttagatgcacctttatttgttgacaataaatctttagattatttcttgtccatgagaaagcaatggtggatggattacatgtcaatgtcacgtttgtagttggttgtctatgcctctttgtttgacattgataacctgaattttgtatgctttgccaggttaaacgaatctacgattgcatacatgttaacaaaatatctggtattgtttgttaagttgaaatatgaaacttgaacaatgtaaaaatatgacatcagagtttttttctttttcttttggtttgccatcgttgtgggttgcgatgtgttgtcttgctataatgttctcctagtgaaagtatgcataatttcttaatgtttcttaaatccttccgataagtctcaatggaaaacgagagaagttttacaatttttgttccaatgtacaggcttgtcatacaaaggcagaatatgaggagtatggagcaagcatttgccgtacaaatcccgttttcaaggggatgtattaaagcaatgatgaattaattagttgatcatggatgcagttacttgataaacagttgaatgaatatccggttattttgatcctcaattcccctgctggtctttcttcccacccgtattcgtggtgtcaacaccaccaacgacctcagaatccgacccggttactagctcctcctacgtacgactcctaagatgtttttcttcttctctctttctttctttcttttggggtattttgaactttttttctcggtaaagtgttgctcaatgattgagatttgagaggtggtgatcgttacggtgggtgatgatcaaaatcgcttattgcaccgtgtattttgcttaggggacgatggatatatgatagcatagaattaatacgttatattgatagcattgtacaagaactccagcatgtaatttttttttttgctgaattctccagcatgtgtattttaagctatgttatataatagtatttttttaaaataatggatttttatagatcacttatatatcatataaggagaaggccgtcgtaaaacattgttagaagttattcttaaatagaagtgcttctacgagttatctgtgaacatttattttgattgagtctcatgtcttatcttaatcttatatattgaatgtttttttaattctttattcctttaaaatatatttcttaatttaatttgatttaataattactccaagaatttatttctcaactataggcatggcaacgagacccaagcccgtggatatccgtcaaaacccacccgattttaacgggaaaaactcgaatttgttattgttgatacccgtccagctcctgtcccgcgacaaaaattcggggacggaggcgggtttggtattgatgatatctgcctcgcccccgcccccgccataattaaattacaaatttagccttatatataagaataaaatcccgaaatcctaaccctgcccctcatttctcattctcgacggcgttgaaccttgaccaacaactttctgaattaattccattttgaaagctttgttgctgcaatggacctctactctttgttgtgttttattttaattttggaacaatatatatttaaatgatattatattttgggagaaattaaatatgtaggtccataatggttttaatcaaattgactgattttctttaataatttttaaattatgatctcatattttgaatgtggatttgttattaatttttttgttacctagtcaacttttttccgtttttttcaaaagaaaagccacattatttttttaattaatagtaggggtgggacggaggcgggacggggaaaacccgacccaacggggacggagatgagtctgaattttaaaacccaacggaaaatagaggcaggggcggaggcgggttttaaaggcgggggcggggacggggaatacattacccgcacccgccccggcccgttgccatgtctactcaactatctcaaaccacttaccttttatttttatttgaaccacttaatttttttaactacttatctctttccattatcatttttatctttatttctaaactgaatttcaataattttttaactgataataattaaaaataatcttgtattataatattataaaatataatttgtatgttaaaaatatttatttatcatgaatttatatttaagtgcatgatccatagggacaagcgaagccatgttttacagtaaaagaaaaaaaaattaaacagttgattagtatatgacatcacatatctatatataattattgaaaataaaattaaaacatattataataacaattcatacaaataaaattaaagtgagaaatgatagtccttagttaatattcagtctcccttttgattcctgcggcggataccgatggacaagcgccaagtatcaagtagtgtctctgggattaagtttgcaaaacaccactgaattgagtgagcccaataaggtgtgcaccttggtttgtacccaatttcaccaattgcagctcttgcataagcctcagctgttggcacgaacaaagaatctctctcaatacatgccacccttgataccatattcgttgcaacgtacaggggtaccttcattcgtgatcagaattaaatatttaatcataatatggagtagtttacccaaaaaaagaaaatgatgaattcatcatacgaattacatcacaatactggactcatcccttgatattatatatattggttgcaacgtataatggtaccttcattcatgatcagtattaaatattaatcatgaatactaaagtttacccaaaaaactgagagttaatcatacattgatcagaatacagaagtcatgcatattattaattaactaataagcacatgcaaactgtacttgatcactcatttccaatagttgatattcttttctaagactttaaacatgaaataaaaatactatgaatgttaaaacactgttcctgcgagtttataatgtagctgctttagacatctagataagtttacaatagttttctctagctgatccaaggcttgataatatgtgttgcacattacctttagtctgtagccttaattataaaatgtcagttcgttataagaacaaagaaaaaacaaaaacagtctaacaaattaaagtagacatttgtaagtacctgacattgcacatgtatcccgtattgtccatactccacgtacagagatcttgataactgatccacgtaactgcatctttccatcgtccaattcactttagttttcagtactcgcctggggtgttaattaataaagacactatatatgcatattattttatttgacttatgattttatgtttataatattggtttgattctgatattctgtatatttatattgttactcgattaaaaattatcttaaatttaaattttgacttataaaacaattattataaaaattaacatttttaatttagaataaataatactgtaaagatttctcttcactatcatttgataaaaaaattatcatgtgtatgataaataagtttgttgagttttaattagatctacataacattacaaattatattatttttaatagtgtcattttcattttcttaaaaaaaatattagctgtgtttattcacatctctctctatatataaaagctcttagaactttttattcacaaaagaaaagctcttagaattttttatatataaaataatacagaatgtcagattactatcataccaaaacaatataatattatgcttacaatatttttataattattttttaatttttattacatcaatcattttattttgtaactttttaaattaaaagaatttttttgaaaaaaaatatatttaagaataacattgccctcattaaaatatagttgagtgacgatgtgagaattgctgtctctcttaaaggagagttcagtctcattaactttcgacagtcacccgcatatcagtgataataaccacgaaagtactaaagaatatgtctgaaatttttgtaagtactcgttgaagcataaatatacttaagaatttagaagaaaaataagaagagaagaaaattttaaattaatataaaatttgaagtgtaaaaatatcataacaagataaagaaaaattaggttataactttttgtatttatttttttatattttttatctctcatttcactatcacataacttatgatagtatttatataattttattcattttttctttttttctccatctaaatccttttcaagatggatatatgtacaaaggatcgatgtaaaaacatatcatttttgttgatgttaccattattacaccttgtttactttgagagctttgtcctttagtggtgggatattgattcagctcactttaattagccaacacgaagcaagttaatgcttcttcatcgttcttattttcataataaaaaaagattcttactaactaggttctttagccaatatttttaggaaactgataaacctttgtcctgaaaaaaacgtcattcttatgaacaatgctaataatcatgttttcagttaattacttactttgtaaaagcatttttttcagttagaaagataaaagaaagaaagaaaatggaagggttttagatagaaagaaaattaagaaagcttacgcctttgtagcagcatagattgtaaagagaggatgagaaggcacgaccacagaagcacccgatccaatgttaacaatcgcaccctttctcctctgtaacatcccacgtaaaacaattttcgttactctcgtggttccttcgatgttcactctaacaatgttcctccaaaccttctcctccacctcatgaaagaacatcgccctcgggtacgtgatccccacgttgttgatcaaaacgccaacatccaaaccctcgctcgcctcctccacgcgccggagaccctccgacatgtcgccgccggcgaagtccatctcaacaatcttcacgcgcgtgtctgggtatttttcttttatttcaccggcaactgtcccaagcttctggaagcttctactcacgaggataaggttgagtcctctctgcgctagctggtctgcgaaggcttttccgatgccgtcggtggctccggtgaccagagcccaggaaccgtagcttcggacgagattcttctcggatcggaaacaggttgggaagatccaagcgaagaaggagatgaggcagttgagggtgacgatcaaaccgaggcatgagattatgagtactgtgaggtagtactcatcaacaacactgctgcatgtaataactatacgtggcattgtcgtctctttttcttgcctatagttttttgcgggttttcctagtttggcagaaatgggttgcgttaaatattgtgacaggtgaatacataacagtcatatgcacggaggttggggatgcaattaatgaatgtgaaacaaataagcattcctacacctaacaaaccacataaacatttcccgagcataccaaattgctgctatgctaccatcacctttacctgtcaagagttatggaatggaatccacttcggaagtgaaaaaggtcgatgtgctggtgcaataaattcatgatcgaggtagctctatcttttagtgaatgttttaatttggagtttataattgattttaaatatatatatatatatatatttggttttactttaaaaaataatttataattgattcctagttgaactaactttgaggaatatgtgttggatataaaattttatactgaatattttatttttaatttgattttattataaaacatttaaacataaactaaatcattttaaaattaattttaattaatattaattttatatataaaatcaattttatcaagatcaattcaaacacacacttagatctagggtgtgaagaaaaacaaaaagtttgagataaactgattttacacctagcttgaatcaaactgatttggtgtcaagcaagttacattaaaacaaattgaattaatttttaaaataagttcgatttgaaccgaattattttttctaaacaaatttagtaaagtgaattgtttttcttctaaattgtgtttttataaagtagtttgaaaataagtttgataactgattcaattctataattagttcaagacaaaatcaatttgttttgaaccaattctctaaaaaaatttagacatttgaatttgagaactgaattgttaaaatggttcaatttttttttaccgaaccaatttgttcatacctctagtttagatcgaaatcgaattactgagatcaaaattattagttataagctaattgagtgatgcattcggatgttggaaacacattttaattaacacttaagttggtatacattttaataaaataatgttattaattagtataaaaaagtttgttgagattgattgttttttatattttagataattttttatgaacaaataatgaagaattagtagatacagaaaatcaatatttttttagattaactaacacgatactcttgcttttgtgtgttttatagacaattaaataatataatacatatttaatttattaagattattgttgttaaaggaatcaatatttatgttgagtatattatttacaaaagtctaaattgtatattttttttttgtgattagtaagagtacaataacaataaaatgaaaacctttagcttagaataaatatatataatgcgagtttgtatattacataacatgatatcatgtaagatattgagatagtagtcattgatggagttcaaatttagtgtattacacttttaatttccttgtggttttttgatgatttaacaagacaaataagaaatcacattggactgataaatggttagctaggagacaagcctaaatatgttgtttcttcatatatttcaaattattttagataattctacagtttttgtatgagaagaggaaatgtttgagtctctttaagaccttcttcatcctatcacattatgtaaggaggaaaaagactacttgatttagaaggaaaacagttctcatgttctattaagttggagtacgtacaacttgctgcattcttaattaacaagaatttgcttcattcttcggctaagattgttttcataaatttttagacatgcatgtgcaattcccttgaaggtgttgcccgtgttggcgtatagttgaaggcttctcttagtagacttcctacacatttgcagcatttttaaagaatattttactattttcttaattttaagcgtcaatttaattaaccattacagttccagatagatttactcaaaactcgtcaaatgtagcgggagggattataggggttatataatctactaatcttgttcgttactatatcgatcaaatgaagttggcaaagtagaagcaactagcagttgtgaattaatgattcaattaacttcttctaaattgaattattgaatggcctaatccgttttgcttgaactgagcaatgaggagtcacgtgaattccaacaaccaggaatggtcgccatttaagtccaacctcatattctttttgtttctgatttgtttttctgtttcgcatgtttgcttgacagctaacgctattcttcatatgaatcaaactttattgcttgaattttatgctttaccttaatttgtattttgttttgtcttacacctctggattggactagggtctttaattactctttcatcattctaggattagttaactgttatgctggcatgggattaacattgcctaagtagaataatcatttggggttaattttttgtttaaatatatttgtaatctttctacatatatatgatcgacaagttttagttattccaattttttagttgcttttaatattcataaatttatttaatttttaaatgatctttaatttagtgagtatatataaggatatattaattaaggatttcattgagaacgttagaaattaagtaaaaatagaaaaaaccaaaatacattcagccaccaccaccatttatttgctacatgtgtagcgaaatcataactgataatgatgtataaaaaagtggttcaagttagatttgccatgcttggcaattaaacatcgtctctttttaataataaaagctgtccctgtcgtaattaaataatatggaatatataaataaataatttaattaagtatttgggatgcatgtgtttcagtgaggttgcgtctagaaaagtttttaaatattattttaattttttttatacacttccttctataatcatatataagtagtagttgaattttttacattttttatccatatatttatttatacatgtgattggtaaattatatttatttaattatatttatttatacatgtgattggtgaattttttaagtttatatatatatataaaggacatatcatatgataataattcttttatgtgaaaatgagaatgatcatttttattctttaaattataataaaatgttaaaattaaaatattctaaatttaagttaaagtctcatctaattataaaatttttgtaagatttatgatattctaaaatatcttaaatctatcatcataattgtcaaccgccatcatcactaccaccactagttgttagccttaatgtcacaagcagcgacagtgataatggcagtgacatcatgttggtggtaacgacgatgataataaatcttataaagattgtatgattaaacgagattttaatttaaattgttttaatcttgaatttttattttaatctaacggatgagaatgattaatctcaatcatagattaaaatgaaatgtcaaaattaaaatattttaaattcaaatcaaaacttcatttaatcataatagttgtggtgaggatcttaattaaattaaatctttaaaatatttaattttttatttgataaatcttataagaattttaagataaatggatttttaatttgaatttaaaatattttaatcttaactttttattttaatttaacgactgatatttgagattaatcaatttcattctctcacataacattgttatacatacatatttatatatatatatatatataattttaattttaattttaacaccttaattaatgtatattttaatcatgttttagttattaaatattttaagttttgaaattattgatagacgtgtggagattttttaatggaaatgattttcaatgtttaaatttattattcataaattgcaatgatggttttataatatatgatacttaattttttgttttttttttaaactaaaaataagtaattgcctagctgagctcatcaacatcacgaagtaacagcaagaaaaacatatctgtttaactaatgcctttgcaaaaggtagttagttattgattctcctatttacatattactttgtgccggtgcgtacaacaagtagaagggaaaacatgttaataactggaagctacaacaatggtttgagaaggctctgcaactattttctttcttttctttttatctcttatccgtggtctggagacagatgagacctcagaagaaaaactgaagagaatcatgatatacgtcccaagcagcaagaaacacatccttatacccttgtccttgtctagggtctaaagcaaaaccactttttctgcacccaagatcatatgtataatattattaaatattgaacttcattgcaaaaagaaacaatcgtagaaacacattcacatgatttctgtgaaatagtacaagtttatattttctgtttttaaccttcaaatgaccaatgaaacacatgtacatctaatggtgagaaatctatacttttgtttctcgtactaaatagcataactctgtattattgataagtaactagcagggtttatcatcatctttgcgcgaattatttcttcgctgtgatctaatgccccctgatcctcctcctccagttttttttctcgtcactggcctagcttattgaatataacagtgaatccttcagctgaggcaggatcattcacatcccatttcccgaacttgggtagtggctttccatcttgttcatactccacatgcaaacataaatgcttacgtcaaaacagagattaattattcatagaagatgaaaaataaaaagacccttttgctcatcattaacaacaaagaattgctggaaacctcggtacatagctaaacctcatttccattttgtttttgataaaatcaatgactttttttgttgttgtttaaaatcattggctagaaatgaacacacatgattacatgacatggtgggaggatcttaattcttaccgaagccatgaagattgaagctttgtgagatatgtggtagttacccaaaattcgggggaaaaggaacagacaacaaagagatgagaaagaaaaaaaaggaaaaagagaaagtattgaaagtgcagcattttataaaggggtaaggaatagaaagaggagcgcaacccaagcttgttgagatcttaccttcctgcttgccacactcgtccaaaacgcgggtgatttggttttctgtttattttccgtttaatttttaggggaatattccttcaaaaggttaagtcccaagccaatgaagccatattccaaaaatgggagactaacaaaaccaaattggtaagcaagccaagtgaccccgtccactttataaagtacagttatcgatttatggtaaataaattacatggaatgttttctaagagaactacaacagaaatctatatataatgttgtaatatacaaacttgaatttttccttaaacaatggaggagagagcagtgctgccattagtagctgcatttgcaaacatacttcttggattggtctctaactctgatttctgtatcacaattttatacaacatcaaatccggggcagggagggttagatgtatagagatgcggtgacttatccatgaagatggcaatcactcatttaatttctggtttggtgtatttgacgtgaaccgctataaaagccctccaatcaggttgttcactgcatgagaagccatgggaaccgcaacactagaggataaaattgtagcatatccataagcaagaccaacaaaggttgccctaaaacacaaacgaaaatcttattgtaatttaatcagaactaacaacacaataatggaaaaaagttgtgatttagtgtaggaattaaattcagcaaaacaattttcgataaatggggaaaaagagagaaatgagagggagagaggggaaataggaaagatatgcaccagatggcaaaggaatactttcgaccattgctaggtgtaaaacaccaaaaatcaaggcagcaatcctaataccattccagttcattcccaaaagtggaagaatcgctcctcggaaaagtagttcctggaatttaagatgacaatatgtgatatcagtcaaatgatgaaaaataaataagaaagacaaaataagccaagcagagtagcctcttttaacctcactaataccaggcaaaaatgcaacaacaatataatccaaaggctgaagtgagctaaggacctgattcagaaagcaaaatatttccagagttcagcaaagcatccatgtactgatacagagtacagacgcaaacacaaaaaagcacagacttgcaagaaaagttatctcaagtaggaacgatttctactcagatgcactacctttttacggaacttattatgatctactatatagtattcaagttttaaatggcaaaccaagcttacaaaatcttaaaggacatttccagagccatggccttgattcagttacctgctgagtggctgcctcgctagacccagcaaaatctagccacgttttcaatagcaaatagggatatgagaacatctttagtataagatcttgagaaggatcttgaactcaagatatggtcttcactagatctcctaataaaggaggtggatagatctccaacatgaaaaataagttcttataaaagaaccctcaagatacttagtgttaaaaaaaaaaatctctctcctttaaatggggcatcagcataaagagaaaaaaaaaactaaaaggagataaaaaaactaaccacaaataatgaaatttgatttttcttttgaacaatctcttacactttttctattatcaaatttatgtattttttatttcttttaacatttactcataaataaaaattatttaaattatttcatttcttagtgttcatatattttttccttccatattttattaattaaattaaatttaattgtttaattaattatatttaatttaataaatatttaaatattaaaaaatgagattcatgttagactcactaaaaagttatttaagatctcaaaatatgatatactattaaagaaaaaaatggaaaagatcttaaaatatattcaatcctacatgcatgacgctgagcaaaaacaataaaaaaatcctacatgcatgacattagtacggggtctactattattggatgcacaaaattagagtttatttgttagctttctagaatgatatttttataattttgtgaatttataatcaccttatgagaatgaataatgacgtattttctattatgagaatataatattagatgctttcatttgtgaatgatacttatttatagatatcttcatctaggatgagaaaaagattttgaatacctttatttatgatggaaaagacactaaaacgtcattgcatgaaatatgagtttatagatcctttgaagaatatcaaatccgcactagttctagaatccaaaaaattgaatcttatgattatggaaattactaatttgtgtttattatatttatttgaatacattgaagtgttattgtttatttaaatattttatttattcaggatgttataaattgcgagtgtttaaatctgatttttattagagtatatatacatataaaatcttattttaaattcattacagatattatgattgattttttggattcttacgtcgaccaataacaatactatttacaaagattctaggtttattttattcactagattattatctcactaaaaatcttatttttagagcaaaaggaataagttagtgaaattgataaggcttgaagatttagttatctttagatacattttttactttgttagtaaccaaaataatatgtggaacaagttccacgatactccaacaattgagagagagcgagagagtagccatacagcgagagtgaaactatagaagctttttccttgtatttgggattttacccttcaaaattcacgttcatactaaccaacattcgtttcttattttgacagaaatttgcaagttttggatgtcgtgtcgcgctttcgagtttcggtattacttcttgataatttcagaaagacccttcctttctctccactaatccactaatttcacttgcatcctgtataaattatcaataaattaatttgtgaaaattatttttcattgacagtagtaaaaaaaattcattataaattaaggaaagtaaataccactttaaatatataactaattaaaaattcaaatgtatatttaaagaccaaattgacaatacacatttaagttcagataccaacatatcattaaataattaattttaaggattaaaatggtaataaattattaacttcagaaattaaattaaaaaaataacaatttttgaaactgataaattaattcattgactatttgctcacaaattagttttacctaataaacaacacatataaccatttttcaatgataattggatccggaggtaggatgtagacatgaactttgagttaataaaaaagacttagatgaaggatgaatttatcctactttttacacattcgatatctaaattttaatttttttcatctttttaaaactaaaataaatatttatcctaaattaattccatttgatatgaaagtgaaaaatacacaccttacaaaatgagaaaaacatagttatgttaggaaaaaaaattactcctcaacataattttatgaaatccttgcaaataaaatatacttgggcttgtaacgatcgtttttatatggaatcatgattcatgacagtgattcagcattgcttccaaaagtttgaatttatagttattggtactcataagtatgcttgaaaattcttgatggaagtaggctaaagccttagattttattttacaaatttcaaaatttaatccagtacctatttttaagtattagcatattataaacttgtccattgtctcgcgtagaaaaatctgattaaaggactaatgtcatatattacctatttcaattttgcacttgaaaatttctttgaaaatattactctgatttagtaatttccaaatttgaaatctggatagatactattaaaatttaaattttgttagagttttcatgtttcattgttaaatggtttaaagtgatgttgaaccttactgttatgatctctaggatgggtatacacaaattttgacaattctttgtttgagaattgtactgaaaggaacctcttatttattcataatttgcacaaatctactactaagcatgctgttgagctggaaataatggtacaaatatgatgtagagtaaactcttgccaatatagccatcaagaactgagttggagaagagttaccaattttttttagggggaagagttaacaaggttctttagagcacagtggttaatattatagagcagtgaactcagtatcatgttcctttaaaataaagtggaccaggaaaatagaagaaaaaagtatgtcattcataaaagtagcagttgacaaatcctaaggtgcaaatagacaacaaaacaagatgaaataaaatattcacctttgcctagtcttgactattgactaagctttactgctatggcttgcaagttctaactggtccttctcgctctaaaagctttatttgcacacaaaatgttgaaaagaaaagcatctaccattaattatgatttctgaacattccaataaaaaataagattaatctggtttgtagaaaatttctaattttaaactcactgctcaaacacacacacggacacagacaaacacacataagccgtgctgcccattcatccacacttccatcttgtttggtagctgccacaaacttgtagaaagttaaattgggtttaccataatgatacagtacagacatgacgaacttattgattgtaatgcagttttacacagggcaaggcatgtaccacctagattggaatcaacccatttaaaatttggctatgataatatgctttttcatttcaataaacacagagcgaataagatccagaatacagaaggtgataatatgcattttaatattactctaatcatgttgcaatacagcaaataatatcacacacacaaataataacatcaaaatcataatcagatctagagtccagaaattagaataatacatgaacaccaacaaaatagattcaaatattttcagaaaataagaaaagaaaaagattggagaatagtgagaaagaaattttacgtggtccaaagagaagagaagagctcaatcacaggagatccaagggagaagaaaaaagagaaagccagagaagctcgggcaagagagagtgatcaggactcaggagcatgtgatggtaagaatttatagccaagaaaagaacatgcgaggttgaatagttgcaaacaagagtgagggtgttgatgatcagagaaatttacaaattctcagagttttggtgttatttgaaattctctcattttactttaaaaataaacccttataaagtccccattattaaaaaaaaaaatctttgaatttgatacaaacaatatattttaatacttggcattttaaatccctttaaaaattgaatttcactctcaaaactccctaaccaaacacatactaatagaactaaagatgaaacatgcaataacatagaatctaaaacaatagagcattattgacaataaaaatgatgttgtattaattttctgcatctcataatttacaacaatgccattggtcagattaaataccatgtctcaaatcatctaagatactatcaaactaaaccattcagaacctaaattgatcaacagaaaagctttcaccttgtaaagtttgattttcttctattttgggaagaagtaaaaaaaaaacaaagagtaacagctagagtagcagtaactatataacctattctgttgaagatgtataactatacgcattatatgctgcagcaaaactaatctacagagaaactagaaagcaacataagtcaaaaaaagagattgataagtgcctcccttttcacctccaacatcacctcataaccaataaagaagcctgccagcttgcaaaataaccgtgaagtttgccaaaaatgggttaactgtctattagaacttaatgcatgcaaaatttatctgtttaaaggttctaactggacttccattcttgcagagggctctaactctttatctgcagttgttctggttggcctcaagagatcaactgaatcatcttcctcaagattaccaagcacccaattgcctcttccagatatctgccgccctattcgctgcctttcatggtattccaaataaataacaatcaatgcaccaattaaaaaccaaattgccatagcccatctgagtccatggacattttccacatcatatctgtctcctagatgcttcatcccagtaaaaagtgctgcaatgccaaaaacaatggcacatctaccaacaattgtgtggaaatattcccaaataaccctcttggaggatgcctgctccccatttgctggttttggaggccttaggaaagcatttactggctgtatacaagccaacaatatagtagcaaatccaaatttaacatgtgttgagctgaaataaaatcccctaagctcagccacagcaaaaagaagggcaagtagaacaattactaaccctgagtattgcaagtaaacatgtatccggtaccatccatcgcccttgagatgttttagatacctggctgccaataaccctccaggaagcaggataccccatgcaacaaacatcataaatccatgcacagccaaaacaggaagtaaatcctgctccgcctctgctgaaccacgcatcaggtgtacaaggatagccctattacttgtactagaatgcatattcctgtcagtaagatgatcattggtccatttagcacccattgcccaaacagctttgagtggagttgtgggatcaacgatatttttacattctaccctcttttcccgcctacaagatgggtccaagggacgagtaaactcaaaggtaatgatgccattttctgttttacatctaacatgtgtcaaattttcctgcgttgcatgtatgcttgaagcatcctttccatcaatccaataagtgttaacatgtcccataccagtatcatcaatccaacccacatacacatagctgttcaccattccacttccaaaccctatggcaatataaccactttttctctcgccacgagctgcaatagatatggaatcctttgacaatgtccaaaagaaagtaacctgttgatcatccaaaatgacactgttattatacatgtccgatagacccccatcaaccacctcgaccttccaacccatcttctggtcgaacaaggaatgatagtagacgtgatcaggagtgttcctgtcaggagcccaaactaattctgtaggactggcttgaactccgtgggcctctggacctccagcataaatagtctcagtcagatttctcgtggtagcatttccaccaagcggatccgaagtaatataaagtgcaacatcgtgcccggcttggatcgaaaacttgaccggcacccctctttccactctcaagacaggagcttcctttttgttgatataaagaaccttttcaggatttggagggttggggtaatgcattgccggagcagaagaaaccaccaacggaacatttgcatctgcagtgatgagaccttgatcttctttgtcttcagcatccaagggacctgtacactcattcacatgctccgagacattcaaaaccaaatggccataattcacagccccatgattctgaggaagatagtaaggattaatagaatcaggaggcttgatacgccccaaagcccaaataaccttcatattcgctgaatggttcacaggatgatcatactttccatcgaccttagtcaaatgcctgcggtatctgacaaaggtcaccccatccttcctatggccataaaccaacattgaattgttgactaaacccaccccatcagggccttcataaaaggaatcaggacataccccttgagcaactccatcactatttctcacacactcactatacttagtaatgaaaaaatcatccacaaagggcataccatcttccttaaaccctgcaacgacaacatcagcgccaatcatgagatcagaatcttcagcactggaattagcccacccaaaagccatgtaattggtgatcccagtcgcggcctccaacccaatttcaagagaatcctcggacacgttcaaactccacctcaacctgaaattcttcgacaaaaccttgcaattctcgaacaccgtcggaggcggcggcgtcgccgggacgtccttgcggagcacgacgtggccgaaatcggaggcggtggcacgatcccagacggcgaggacgttgatcatgctccaggaaacattgctcaacaaatgcacatccaaggtggagttgttgtaggttccgttcaatccgtcgttggaaacaatgaatccggcggtgaggctatcgaaatcggaagcctgcgcaccccaccagtggacgtcggaaccgggaagcatgtcgaattgggaaaccctaaaggagcaatcgtccctgattttcagggatcctcggagttggtgttgaaccatttcgaactccaactccgaattgacgacggagctgaggcgagtgcaattgggagcgggatccgcatatacgaacaacaacaagaacaacaagtgtaggatgaagatgagggatctgcgaagcatgacgggtgcacttgttgcactgtcacgcaaattctgtggatcagaatccacgatgaccaaaccttcaggatcggatcgtaacaatgttctgtgtgcgtggcggaggggttcagttaaggtagttcacaaggttctgtcagtcttcgggtggagagatgactcaaatctagtcaatggttgttgtattgtatcacactatcagttgatggatcctgacttacacctcaccctggtgagccatctacgtggattcataaatcatgatctatataatctataatttatttatgatttattttacctatttttaacttcatatagttattataaaaaataacaaattaactatacataatttgtgagtagatttacgctgtcatatttcttcatactaataaaaaaaaaacacattgtcatgtgtaacattttttttctgaaacattttttaattatattattgattattcatcaattttatttaaaattaaatataatatcattcaaatcaatgatttattgatatttataaaacatatttaatgaaatataagacgaataaatattgattatttgatcaatcatatatattatagatgatcaaattaaaacatatataaagaattttttttataaaaaatatacttttttaaacaatcaatgtaatattaaatcttgattatttatgaagatatttatcataaattaccaatataaaaaatataacgacatgtgattttcttaaggaaatgtattctagatataacacgcgagttgttcttgatggttactgttttataaattatcaacacattaattggatttacggtaaatatattgaaaactagtaaagcctaaattgtctaaatttaaaatagctaataaaacctaaattttggcttacttgctttatgttatgcagaaagtcgacacattggtgaaaccttaagcaaacaagtttaatgtcatgagagaaaacaccaaaacttatcaacaatcttcattcttccatggctagctttcaaaggtggaatttgattctcttaagtccaagccacttccaaaatggtcttaaaaatatgttctaatggagcatgaacttacttacatccaagaaactcccataagttaactcaataatgaacagttcaccaaagtgaaagcaccaaggtaattggtcttcaccatattgcattttaggagactttttttcaagggaaaaaaaaaatcacatgttgttcctaaatctattgacaatttatctaaggatcatgcaaaatatgcatatcactcattgaacatcctacaccacatcggaccgttttttatgaatagccctactcttggaattgaatactagatcattaatttccacgtgaccacatcaatgtttagcatgtagaactttaacccaatgagctatgtcattatttaatactatatagtccactttgatacatagctcttatttagttgcctaagattacaaaccccttgcaaaccattatacttagattgcacatatgctccaaatcaattaatgacattttttaacaacagtggagcgcctaataaagttttttacagaaggattaaattttggaatatggaaatttacatcacataagtgactaaaaaaagaattaagttaggactgtcctccttagcaaagaaagataataagttttatagtcttgcaattctttttaactttatcaattaggaaggcattgttctccctggtaacctttcagcaaagaaagaaaatgccaaggtacatacctaaattatagcaaagtgaattgtcattctagatcaaataacttcaagtcatatttggagggtatactctgaaattatgattgtaacattgatcggaacaatcacaaaactattctgacacttgattaacacagtcaacttgaaattcaaccgctggaagaaatggattctttaatagcatgggacaaatgttatacagtgcaaaattaattggtaaagtgataatcatattatggacatagagataaattgtgaaaaaaaagtagtgttatatagtttgttattatcatcatttgtatatataaaattcttttaattaatttacacagattaatcaattaaaaagttggtttataagttggtagtgttcaaattgtcaaaattttttattatttttctaaaagcatccttaaaattattgagattcttcgtttcacttttttatttaattatttttatgtagttaattaatgtgtcttaagcctttttcccattcatcaccaaaaagataatgaatttatctcattaatctaatacattcattgtttactagaggaagaaagcacttcgtatttctctaaattttttaataataaaaaataaaaaattcaaaagttaaataaagttaataaaaaaaagagtgtcagagaggaaaaaaactgacaatataaaaatagtgggcaactattcttgtttagaagaacatggaagtttaaggataaatttttctactaaaatatgtacaccaaataaaaatattttctttattattagtattgattaaccacagatgaaaaagtacaaaacaactaaaggtgttttaattaaaaaattaatacaagaacaattttgaaagaattcttataaaaatgggaaaagtaaacctttttttttaaaaaaaaaatatttgttttgacgtttgaagactcaaatgtttgttgaatccaattcaactagaaacatacttcttagttaggatgctttgaaagttatgtaatctataccccaaacacacccttagaaaatatgaatatgagtattaaagtcaataaatttatcatacaaatttatcacatagaacaaattataattagatgaattcataaaaattcacattatcattacatattagtttttaggggttttatgtccaatctaatataaaataataaggattgattaagtttttaatccataaacttttaaaaatttaaatttagtccctacataaagtttgactagtcaaatcctttaaaataaattctcatcaaaacttttagtttctctcctcaatgttattgttaaatgatgatatgaagatgtacacaactgccatgtattatttttttgattatttaatgtaatttgttttcatgtctcaaatgttgcattcttaaattggataatttttttccaacaaaacaatctgacttaaaccaggtcaaaccaaattgataattttttttattaaaccaaattgatgactactttttaaaaaatgttaattgtcacttttttggtaacctttatgtgaaaattgaaacttattaaaaattattacctcttattttatatataagaaataattatttaattcaataagatcaataaaataattagatagattaatttatcataaattttaattttattctaagattatctatgatattaaattgtttaagagatgattattttttaagatgaattatcttattttattttgttcaatttgatcttttaatttgtttgagatgaattatgctaatcatgtaaaaatattttttttagttcatttttttcttattttccacttaatttttttataaaaaaagtttattcttaaataaataatgatgtcctgaaatggatctaagaactaaattaaaaaaaagaagaaccaaaataaatttttgaaaagatgaaataaaaactataaataaatcagattgaatttttttaaaaagaaactaggacaaagaacgaaataagtggtcagtattttttttttttttgcctataagttgaaacaagaatacaaaattacaaatacaaattaggaatccaagtaaaaccctgaataaggacaattgtttcagatctattctatgaactgatagtgatacaacaccatttttactcatgaaaacgaggaaaacgttgctcatttctctaccggaatattaacatctaacacaaacaaacgtgtctgtgacctaccttaaatgaacccctccgccacgcacacagaacattgttacgatccgatcctgaaggtttggtcatcgtggattctgatccacagaatttgcgtgacagtgcaacaattgcacccgtcatgcttcgcagatccctcatcttcatcctacacttgttgttcttgttgtcgttcggatatggggatcccgctcccaattgtactcgcctcagctccgtcgtcaattcggagtcggagttcgaaatggttcaacaccaactccgaggatccctgaaaatcagggacgattgctcctttagggtttcccaattcgacatgcttcccggttccgacgtccactggtggggtgcgcaggcttccgatttcgataacctcaccgccggattcattgtttccaacgacggattgaacggaaccttcaacaactcgaccttcgatgtgcatttgttgagcaatgtttcctggagcatgatcaacgtcctcgccgtctgggatcgtgccaccgcctccgatttcggccacgtcgtgctccgcaaggacgtcccggcgacgccgccgcctccgacggtgttcgagaattgcaaggttttgtctaagaatttcaggttgaggtggagtttgaacgtgtccgaggattctcttgaaattgggttggaggccgcgactgggatcaccaattacatggcttttgggtgggctaattccagtgctgaagattctgatctcatgattggcgctgatgttgtcgttgcagggtttaaggaagatggtatgccctttgtggatgattttttcattactaagtatagtgagtgtgtgagaaatagtgatggagttgctcaaggggtatgtcctgattccttttatgaaggccctgatggggtgggtttagtcaacaattcaatgttggtttatggccataggaaggatggggtgacctttgtcagataccgcaggcatttgactaaggtcgatggaaagtatgatcatcctgtgaaccattcagcgaatatgaaggttatttgggctttggggcgtatcaagcctcctgattctattaatccttactatcttcctcagaatcatggggctgtgaattatggccatttggttttgaatgtctcggagcatgtgaatgagtgtacaggtcccttggatgctgaagacaaagaagatcaaggtctcatcactgcagatgcaaatgtaccgttggtggtttcttctgctccggcaatgcattaccccaaccctccaaatcctgaaaaggttctttatatcaacaaaaaggaagctcctgtcttgagagtggaaagaggggtgccggtcaagttttcgatccaagccgggcacgatgttgcactttatattacttcggatccgcttggtggaaatgctaccatgagaaatctgactgagactatttatgctggaggtccagaggcccacggagttcaagccagtcctacagaattagtttgggctcctgacaggaacactcctgatcacgtctactatcattccttgttcgaccagaagatgggttggaaggtcgaggtggttgatgggggtctatcggacatgtataataacagtgtcattttggatgatcaacaggttactttcttttggacattgtcaaaggattccatatctattgcagctcgtggcgagagaaaaagtggttatattgccatagggtttggaagtggaatggtgaacagctatgtgtatgtgggttggattgatgatactggtatgggacatgttaacacttattggattgatggaaaggatgcttcaagcgtacatgccacgcaggaaaatttgacacatgtgagatgtaaaaccgaaaatggcatcattacttttgagtttactcgtcccttggacccatcttgtaggcgggaaaagagggtagaatgtaaaaatatcgttgatcccacaactccactcaaagttgtttgggcaatgggtgctaaatggaccaatgatcatcttactgacaggaatatgcattctagtacaagtaatagggctatccttgtacacctgatgcgtggttcagcagaggcggagcaggatttacttcctgttttggctgtgcatggatttatgatgtttgttgcatggggtatcctgcttcctggagggatattggcagccaggtatctaaaacatctcaagggcgatggatggtaccggattcatgtttacttgcaatactcagggttagtaattgttctacttgcccttctttttgctgtggctgagcttaggggattttatttcagctcaacacatgttaaatttggatttgctactatattgttggcttgtatacagccagtaaatgctttcctaaggcctccaaaaccagcaaatggggagcaggcatcctccaagagggttatttgggaatatttccacacaattgttggtagatgtgccattgtttttggcattgcagcactttttactgggatgaagcatctaggagacagatatgatgtggaaaatgtccatggactcagatgggctatggcaatttggtttttaattggtgcattgattgttatttatttggaataccatgaaaggcagcgaatagggcggcagatatctggaagaggcaattgggtgcttggtaatcttgaggaagatgattcagttgatctcttgagtccaaccagaacaactgcagataaagatttacagccctctgcaagaatggaagtccagttagaacctttgaacagataaatttgcatgcattaagttctaatagatagttgctattctggccaatttttgcaaattttgcatttaatctttgagctggcgttcttctttatttgttatgaggcgttttctgaggtgaaaagggaggcagttactcatgaatctctatttttaacatatgttgctttctaatttctacgaagagtagctttcctgcagcatatatttcctatagtgatacatcttcaatagagtaggttatatcaattcatcactccagcagcttcactatttcttttactacttcatcccaaaatagaagaaatcaaactttacgaggtgaaagctttcttgttgatcaatgtaggttctgtatggttagtttttataagagatgatttgagacatggaatgctatctggccaaaggcattgttgtaaattatgagatgcagaaagttaatacatcattttttcttgtccataatgccatatggttttagattctctgtgattgcaggtttcatctttggttctcttaatgtatccatgatccttcctagtaatattaattttaactataaaaggtaaatacaaatgacttaatagtttagacacctttatagcttgaaaatggttgaagtatcagttgaaaacatgaaattattgcaatcccagcagttactagaagcatcttatataaactggcaatatttacaataagcatgtgtgaagatttaagcattgtatagagcttcattattgtaatttcatgtgatggaaattagaggaaatttgggatcttgccttttcttgtgaatgatatttttcagttaatcaattaaacatagcattattgagaaagacaaattttcttacaaatctgtaaaagtttgttttgttgtagattcctaacccaccttcagatatgttcaagaggcttacagttgcgagagtttgcctttgaattttaaataaatcttggatagatttagtctttgcaattgttacaccttctgctctttatttttctgttttagttagctattgcaatcccaataaaatctcacagcagtttagattttttagcgagtttcaaattggttgtgagcccgtaaataagcattctcatttatgaaatattttattctttcttcaattttaatattttctagttccagtattttggtttttttcaaatctgatatttaactggtataaagagctggcttcctttgtgtttgggggcaaagaggttgagtgcaaatactagtgaggttgagaaatttattttcaggcatatggatgaaaatatgtctacttctagtaattcatctataaaattccagtgtttaaaggtaaaactatcaaatttggaatctttcaacctggaggctgacgttgctggccaagaacacagtttacagactaccaaagattcctatgatttgaagagcaccaagggcctagtatagcataattgactcttacttaatccaacttggattcaggagtgaaaatcaaacaagtctatatttgatataaatgattgtggtttgtaacttgtagtgtcactttatgtggatgacatgcttgtgataggaagtaatttacctttgctggccaagttcaaaatggaaatggaagatatatatgagatgtctgatctttggcatcattatttacttcgttggagtgaaagtattccaatgtggctcagttatatttatttcacaaataaaatatgttgttatttgttaacaatctcaagtgtaagttagaatcatgcaaagaagtaccaactttgctagcacaaagtgagagaaattctatgaatgatggtgagaaacttgaagagccctctgcatgtagaagcttgatgggtagtttactgtacttgacaacgagtagccttgatgtttccaactattttactttccaggttcatgagttcaccaaacaatgttctcatcatctcatgggagtagcaaaaagggtgctgaaatatgttgaaggtacaacaaattttggcatctagtatttaaagataggagttgttaagctaaatgtctatgttgacagtgagtgggcaggaagtgtagatgacatgaagaccaattcaagctatgcagttacaattggttcatgtattgtgttttttttaccagtttattttcatgtattattttctagaatgcaaaaattgcatgtagtggcacaacaattgctaaattacagtatgtcccactagcaactattgttgttaaactctagagttaattcatagacttttaacgaattctctcaactcaacttaaattagtcaaactataatgtgacaattagatatagagtgagtgaaagaaaaaaaaagttaatagaaatcggtaacacataagtccaatcaaacacaattgcatacttggtggtttttttttttttttttttccaattttggcacaggttcgtaaagaccaaacgtacatttttggtgaaaaaatgtaagtgttgctgttgcggtgcatatatcgtggtcaaaatagcatgaaaaagatttattctaacaggcaatagtacattagcacacagtgcattgcactgcactgcagcctctagactcatactcatatcatacacaacacaacagcctctagcacatattgcaagtgcttgtcctaagaagaaggaacaatgaaaaacacagggaagcaggatcagcttatggattcttctcactctgattcacccaagaaccaggtaaggtatgttatccatccaccctcttgtttccaaatgctgtgattatgcatgaatcttgcagcatttgtgtgagtaccatgatttatcccataaaaaatgaaaatgattttatggaagcatttttgtataaataaatggcaaaaacatgaacttggaaacagaatcataatcgcagctccgtgacacttatggtttttaatgtccctacaacttctcttgatttatcagcctgtgtcataagctccattctcattctattatgtttgttggccatgagagttttttgtttatattatttacttttaacattgtacccaagttaatgcacatttcttttttcctcacttcgcatgaatcaaaatgttgatgcgttaaaccactccttttgcactcttgagaaagttgaagagagaaaaaagttcccaaaacataaagtggaaagtgtaaaaggaaaatttcttcatttactagtgtactagcttccatgcaactctttcggttgtttacttgtttataacaaatcaaaacctcttcagtaggttcaagattgcctataattcccttattttattgattcaagaaaattttgactatatgacccatccctattccttgccaactgctactacccgttaagttatggaaactgtggcaaaaagatgcacatcttgatgttaaggaaaatcattacagtcatcttgagagttgaggcgatgtgaatactcattgttgcacaaaaatacggagatatttaattcagtctcaccatctaaaaattttatgttttgttaagggtttggtattcaaaatgcaatgtatttttgattcttgtaaatttcagtaacataataaaggatgtgcaatgaccttttttttcttctttcccttatcattggtttatttctaatttgcacattgttgcctgtgttcaatgttcagtcagagtctaggtgccctccttataccaagaagcgtttgattccagattccactgtcatttctacccgccatgcctctttgagatcagcaaagaagcttattgaaactagaggaacatctgtgcaggcccaggttcagaatgttctgtggtagaactacaatccgttccaagacaagttgcacttccttctgcctttatgccacaaaccagacaagaagagactgaaaaggctggagattctgttgatgtagctcaaatgaaaaaagtgagtgaggatgagaacccggtggctaatcacacagttcaaatggaagaacacaatgcatttgaagccctatttatcccttttgagcaggaacatttggaagaggatattgaagcatctaactctggggaaagttcagacaagaacaatggcaagtccatttcaatggttggagatccatccttcagcctcaatcttactgaaattattaatatggggaacgatgaggttaattttgttggacaaagatcatggatggacaaggttgaaggataccaagtgaagaagccagaatgcatccccatattaagaaacattctcaataagcatggagatgtttttaagaattctatggcatcaacaacgacactctggtcaattttcttggaggtgatatgtgacatcatttcagaactggaagacaaggttctccataaaatcacagaagatgagctgcattacatgattgcttttgcaaacgagatgaaaagtatgaaagtgaacgttgagtggcttctctagagactggaagagatacttgaggcaagacagattcttaaacaatctagcatgctaaaagaggaaaatgataggaacaaaaagatcattgaatttgtcaagaaagcattggaatgttgtgaagcagaaaagaagtcactggaagcaaagatccaatcgttccaatcattagttgatagaatttgtaatagagagacaacttgcaagaagacactgactagagcacaggatgaatctgctaggatatctcaaattatcataaatgctaaatctaaagtgaggcgctttgttaattgctctcttggcggatggcttgatttagttttgccatttcttctcctttactactttttcaatgtagtgattttgggattgtttaatgagtaatcttttatgaatgctcacatctatggatatatttagcttgtcaaaatatattttagagtaaattacactcatattttgttcaaatttcacccgatatccctccctttttggacattacttttaccctctctattaacgtcgttaactaacgttaattaaaatatgtgagtaaacaaaattgtccttacatttttattgtaaaatccaaattatcctctctcaattagtttcagaatttaggactagtatgtgtctaatttgtgttagattattaaacaatgtctagaaaagagggagtctaggtataacgtgagttaaacatttaaggagttttttgtaggatgcagaaagggaggagtatggaatttgagtaaaacacatggaatactagtgttactctatattttaatgtaaatctcccttcaggcatgttattgttgtatttaaggtttttttttttttgttaactatgtttctatggatatatttagcttgtcaaaatatattctaatgtaaatttaggggctaaaattaaaaaataatacaatttaaatatttaattagtaaaagggtgcaagttttccaatatttagcaaaatggtgcagccaaacacgcccagaatgggacgtatttcaccagatggtgacacgtggcaggcatgaacaggggcctagggttttcgcggtgttttcgtaaattacagaaggctataacttttgactgggacgtccgattgacacgaaaccggcggccacgcgtccaaaaatttttcccaaacgaagcctataagtgcctcaaaattacgatttaagtttcggagcctcaaaaaatttttgttttctgatattttatctactcaattagtgaatcacaacttgtttcattttcaccagcttttatatggacaaaggggcctgtgggacattgttattagggcttatgttgtgattagagtttaggccctgaggtagtgattatggtgtatgtaaatcgggtttagggtttaaggttgacatggtgattagggtttatgggttggggtacagagttagggtttgtgtgtgccaggttatggtttaggtgtgatgtggtgattagggttgatggatttcagttaaggttaggggtttatattgtaattaggatttatgccgctgggaacagacctagggtttaggttttagttctgattaggatttatgtcttgggttacagagctagggtgtatggattccggtttaggtttagggttgatgttgtgatgagggtttagggcttgggttacatacgttgggtttatggaattcggtttagggtttaggtctgatgttgtgattagggtttaggtcgtcggttactgacttagggtttacggcttccgaactaagtctaatgttttcattagtgcatatggcttgggttatagacctatggatgacagattctggtttagggttatggcagtgaataacctaatgagtgttacatacacttcactaatatggattgtgggtatagaattagggtttatgggtgccggtttagggtttatggcagtgaataacctaatgagtgttacatacacttcactaatattgagtaattagttttccaattcaagttttgccttgccaaacatattgtattggtggaaactttgtttgacactatagttcagggtcaggtgaaacaaaaacacagacaaataataaccaaagtaggaatagttgtctgtttaggaacaattactggattataggatggaaaaacgcctgtcatgatgacagatagaatcaacctgaggtctagggtgtttaaagctttgtgttggattacggttattgttgtatatgatgatgaacttggcacaagttgaaacaatgtacgtcaaggttattgctgtatatttttagtggtttagggctttggattaattaaccccaaacacgaaaccactaaaccctaaagcataaaccctaaatcctcaaccataaacctaaacccaaaacccaaaaccataaatcctaaaaaatcatgctgttgtgatcacaaaaataatttcaaaaattatccaaaattatactgcaaaattgacgatgcatataactttgaacagtcgaaatttctcgtagcaatgtccgatgatgacgtattttatgtcagaaggctcgaaattaagacaagtaattagataaacaaagaatagcttgcaattcactaattgagtagataaaaaaaaatattagaaaacaaaaaaatttttgaggctccgaaacttaaatcgtaattttgaggcacttagaggcttcgtttgggaaaaaaatttgggcaaggggacttgcattggccttctcctctcaatttcgagcgtgtgggcgccggtttcttgtcaatcggacgtcccagttaaaagttatagtctttcgtaatttacaaaaacaccgcgaaaatcctaggcccctcttcatgcctgtcacgtgtcaccatctggtgaaatacgccccattctgggcgtgtttaaacacgcctaaccctaggcgtgtttggctgcaccattttgctaaatattggaaaatttacacccttttcctaattaaatatttaaattatattattttttaattttagccaaatttaggtgacttcctgcggtcatgttattgttgtatttaagttgtttttttttaactatctttttagtccctaaataaaaatttgaccagtcttattccttaatgtttttgtccgtcgttaccattaaatcgccaaaaaaattaaatgtcataaactgtaattaaaataataataaaattagtgctacatcagcatttaacaaaggcttaaaatgtagcaaactattttctggcggcttaattgcttcaggagatgccaatatcgtcagactcaaaatacaattattcatttgattgaaattttggtattatatttttcaaattgctataataatttttttaattgaattttcattaatttaagcaacagtttctactttacataaaatcttttaaagtttgatgtttagtggatttgaaaggaagggatatacgacatgcagaatagttgaatgtgggcaactcctaatagctaattcgtactcattctattttttgtttttgctttctctgcatgttttttaattgttcatctaatgagatgaggattcaaagttgtgaatcatctcgatttgttctcgctacggggcagccaagattgttatgtgttccgcaattattgattctccttcttcgattcgttttgatttgttctcgctatggatcagtctcttcaacaaatctgatattgggtttgggttgaggtccaaaatcagcttcacttctacgggcactcgcttctccaaatccctccctcacactgaaacgtcgtcctctggaacgccatcatcttcggcgccgtttggcggaggggaggggcgggtttgcaaaacggcgccgtttgaccgtgagtcgcagcggcggatggcagaggcgaaagcttcctacgactcatctgataatggttttgggtttcgaggtccaaaaacagatctgagttttgggtttcagatctgagtttcaatttttgtatcccttggttgatgctctccttgtcgattttgacggcgacgtggtggaggagcgttgcgttgaacccttcagagattgcttaatatggtttaatcactttagcaggctttttgtcagttttaaacggccagaaattatgatagtttcatattattacttattaaaaaaacttaatggtaaatactaaaactatggatggatgaaaacattagaaattaaaactgatcaatttttttttcaagaattaaaagtgaaaactcaaaaaaaaaaaaaaaattaaggataaaaaacatagttaatcttttgtttttctggccactgggtttcccactcaaaatcatgttgagaccagttggggatacttaaaatttttaaaattcggagaaatctagtttgttggttgttatttcggattctgaaactcatttttctttcttgctttaaaactataaggaaacttgagacactctaggtacactagatttcagattcagtaactaatatccaaggttgaatgagcaaacctccaccaagaactgagaagagtaaccctactttaataaagaaagcagtgcctctgaatggctaagaactgagaagagaagccagaaataatctcttatttagagttaattggggatgagggagaagttactcaattgttgttcactagttttttctacaaaaaagcaataggatatacagtacatgatcatgatcatgcctttggtgttttgataccaagaatacatcaatattaagaattttcttgtataggagaacattaacatttttcaaattttgaccttggtctttgtcaaactgttggtataaacatatttcaagacgtctttcatactcaactttatttctttctttgttaaaatcatagaaacaaaatatttattctacttctaccttcctcttctgtgccatcatttattccaacaaccactcagaatttgttgggagcatggagtgagaaggaaaagaaagtgataggaagagagattaaatttaaactttctttccattggatgttaaaaattagtaggtgacatgaaatttgcctttttattgtttttaaaattgtaattttggtcatctttaatttttaattcgcacagaatatgatagataagggagaagttaatgttaaatatttttattaatttcctttttacacgcagaagataaattcaaaaaagtagaaaattaattatcctcaattttggctaaattacaaatgttagtacttctctgagcataagaatttcagaagactatggtcttcagaatctaagcatgagattaaaaagtatagcatcatctgctgttagattacctcctattttttggttgttgggtagtttctgcattgaatcagttctctatcatgctcaaactggacatatctaaagggaaatagagaaaagactaaaagaaaatggcatggggcggacgacagagtatgttacatgtagctatttacattttacaacttatacccgttcactgttaccatctgtgtcatgtttattcttcatgaacatggccatttgcgtaatttcgtgcctgctatatgagattgagatccaatctaaacgattggagcatataaataaggtgtttgaacccacctatatgccctacgtaccccttgcttaatttactagaatctcattcaacattgaatgcatcggtaaaggattatgatatagagtgagtatataatatttatgagagtatcattggcttttagattttagaattataagattggttgagtcataaaagaataatgaagagaggaaaaaaaatagtaggtatgatttcttccattaacaaaaatgttaataataacaattaatatttgtgcataaaaaaatctctttagtacttttcaatatttaactgactcttttaatctcaatcttagctttctaattaaatttaagaattaagattgattaatctgtttttgacattctcatttaccatatccatagacccaatgggacaactaatgctggaacattaccttctaattcaaaagtatagttttttagcattgaaagatttaattgaaattaatattttccactataaagttgaattcatatgatgtatatgaggaggactagtcatgaaagggcataaaacatattctatgtgattaccagagccaacttggttgtttccttggtgtccatacccaaatcaattggttcattcagattatatgttgacttaagtcctaaacaagcactactatttctttcaaagggcccttttaaaaaaaaaaaaaactatttctctcatggcttctgaagcttgtgctttccttgcgttgtactattttacgatgatttttctttggaatcgtgtttcaattaataagggatatgtttttaagttgtgttagtcatgttagaaatttggcatgttaatcgttaatttgaatgtttatgatatgttaggctatcaagcgcatcattgcttgaatatctaagattactttgtggctctttagttaccacattattacatgcataaaataaaatgctacatatatcaagggcatccgcaagattacaatattgaaaataagacagaaaacaaaaggcagggattaggtaaaacattcacatttccaacctctcaccctttttgtattcagattttgtttgacctcttttttgttaaaattagaatggtctttgttttgtttgtattcagagacaagttctgtattgccgttgctgacatgtcagcaggaagagtggatgagtgtacaacagtgaatgtgtgagaaaaaatggggataaaaaacaaataataataaagcaaagacaagccaaaagggcgtttgcctaaaactgaaaatagtctccagcctaagatgctgctccattcttctatatctctctcttgttttattactattatcttaccttttttcttaaacattttattttagtttcttttagaaatggatagacaaaataattttttttaattaacacaaaaaagggatctgtttaagcaaacacagtaaattgaaagaatgattattttttttaaaataaattaaagatgaacaaaaataggtgttcacacttatatatatatatatatattactttttctttgaagttaaatgatcagataattaaatttaatgtatttgtaattaattcattagtaacattatgtaatttaaaaatatatattttgtagagcatttaataagtcttctattaatatgacacaattttgagttttagtgagtataaaattgatattgatagttttggttttattattctagaattaaagatcctgaaataaatactaattaaaagaaatttaatattttattagaagtattaaatttattaaaaataatttctttaaaatggatataataatttatgaaatatcattaacgatacttgtaaatattgccattcttaaaaaaattaaactttattttaatgttctatagaaaataacaatgctgtaaaatagtaagaacatgaattaatatatggtaagacattgaaattactatattataactttcaattgataattttacatttttgttaataaaaaaaagaataaagtgaaaattaataacctatattaattatatcataactcaaacataaaaattgctcataaagtttcaacaattttaaacaagactatgatagcagcgatgggaatgtcagcataagctttaaaacctgctttgatgctaaaaatttactcaaatgacaaggtgaattataagttataacccagtcaaatccttctcaagcccatgttaatttctcaagcagcacaaataaggcatgccacttattgtttccttttttttggattagtcacctattgtttcaattatattatatataggaaaccattagttgagtagtaagtgtaactgtaattaagacaactcaaattcaatcaatctcctcaaatttaacccagtgtgtggtggtccaagatacaatacaacacagattttattcccatggcataagaaaaacattttatcacacaaaaaggaagaaaactctagtacaaactgagaaaataaaaaacgattgctttcttacttttagagtaacgatacatatatacatacacttaatactctttaccttttttgtgtatacattcataaagatggtactaagtataaacgttttttggttaaagacaagtttgaattaatatgttctcagagagagagtttgaataaggaagcgctttgggtttgagttccggacctgtgctgtgcaagtgtcttgctttgacgtttagtaagaagaacattgacactaaatatgcctagaggaagaagaacaacaacaacaaaaaagaaggggaagcaagccggggatatggattcttctcaatcttatacggcagaatccagccaggtatgtaacacagacacatgctaattctattatccactttgtttccaaatgatgcagcatatttgtggctacgatgattgttttcaacaaagaatgaaaatggtccaatggaagcatttttgtagaaataaaatggcagaaacgtgaacttggaatataatcataatctctacttctcattttcacccatgtgaggttggggaacctattaacaaaacaaaaatctctctctatctgatatattgtttgctgtgtttctaagtacatgattgtggtagcaagtttctaaatattttgaaaaacttgagtgctgtttgtaagggtggaaccgtggaggttgattttgctccatcacacgtgaaaagttactttaatgtcatttccttgatctgtttctctgttattattaaagttgaggaccgaatactagtttcattagcagctgcatggctcgtaggatacagaaatatgaatactatgttgatttttctccatcatactagtttgttattcttttctgccatcttgaaagttgagcaatgtgaatactcattgttgcactaaaacagaaatgtttagtttagtatctccacatctaaaaaagtttatgttttgttggggagagatgaaggatcaataagacttgtacttttggtactcaaaatgcagatgaatttttcagtaacataataaaaggatgtgcagtgacctgtttttttattttctctcttacccttatcaatggtttagttctaatttgcacattgttggcctgtgttaaatgttcagtcagagtcttgggactgccctccttctaagaaaaaacatttgattcaagattcccctgtcatttctaaaacccgctcctccttgagattggcaaagaagaatattgagagtacaacatctgtgcaggataaccaagttccagattacactgtagttcatgctcgttgtgcctctttgagatcagcaaagaagtttactgaaactagaacaacatttgtgcaggcttaccaacttccacaatgttctgtagcagaaccagaatcccttccaagacaagttgttcaaccttgcacattggcaccagaaatcagacatgaagagattgaaaaggttggagattttgttgctccagagaattggttagttgatgtagctgaaatggcgggaaggagtgaggctgagaaccctatggttcctcttgagcttaaacctttggatgctgagggtattcaagaatcctctaactctagggaaagagcagacaagaacaatagcaagtctatttcaatggttggacatacatcctcacatttcagtctcaacattactgaaatggttaatatgtgggctaatgatggtgatgaggttaatttttttggagtaagctcaccgaaggacacagttgaaggataccaagtgaagccgaaattcatacccatgttaagaaaaattctcagtaagcatggagatatttttgagaattctatggtatcaacaatgacattccgatcaatgttcttagaggtgataggtgacatcctctcagaattggaagacaagggtctgattaaaatcagagacgatgagctgcataacatgattgttaatgcaaatgaaatgaaaaatatgaaagtgaacattgagtggcttcacctgagactagaagagatacttgaggcaaagcatattcttaaacagtctggcacgctgaaagaggaaaaagataggaacagaaaggctatggaatctgccaagaaagaattggaatgttgtgaggtagagaagaaggcactggaagcaaagttccaacaattacttgatagaatatacgataaagagacttcttgcaaggagacactagctagaacacaagatgagtctgctaggatagctcaaactataagaaatgctaaatctaaagtgggacgctttgttaattgctctctggtggatggcttgctctagttttgcaatatcttcatcccctccctctgctttctccatggcagcatttttaggatggtttattgggttattgtattcatggatgttttcagttaattatgttaatcattgtttaaacctgtactaaaactgttagcttccatttttataactatatgtggtatttctagtggcacaccaacatactgtttcatagtagtgtagtttctgaataggttgctatggaaacttgtaggaaaattaaatttctgcaggatagtaagccaatacaataggttcttgaagtgctgttaaacattgtgttgagctcacacggtctatgagaaagcatttgttcataaatgctattcatattttagtccaaaatatatgctattcagattccttggttaagttgagtaaatagtgatactgtttgaaataagacctgaggcttgaattttctgatgagtaacgatatcagcaatcaatgtctagcctctgaagcttaaatttagtaaggatagtttgaaatgttctgtttggttttaacctcttataacttatggcggtattatttcaatccctgaatgcataagaagttcacaacccttcactgtcaatttggagtcatgcacttaaacattttaacatcaacactacctttaattcaagttaattgggatcgatgatagatgaactcaatgatagatcgaaaataagacaaagaaatagaaagggagagaggaaggaaaaagtagaaataagacaaaagagaaaaaataaacaaaaataaaagaggggtgaaaggaataggaaaaaaaaggttaaacaaaatgattgtaaattagattttcgagtacacatgaactcttagggataaatgtattattaagacattcattgattaaatataatgtgttaacttattagagtttgaaagtaataacatactaattaatcttgagctgtaaatgatgaaaggaaacatttcattattttttcattggctcttaaaggtaaaaaaaaagttacttcatgttatttggatgctaaggagtattattagaagtctactttggttagtaaattaattataattaatttactacggatttattattgaacttatgaggtcacacataaacgagagtttcaatatttgcaagagaaaataatttatttgataattaaattagataatttaatcaaataaatattttagtaaaatattattgtattctttattagcaccaaaaaaataattaatataaacaaaaagtattattttataaatgtgaaagttatccataaaataagaattagattctatcgctaaatatcagaatcacatcatgtgattatttatcgtagtaaatagtcatgtgattatttgagagttatcattgtcttataccagaaaacttcttaagataacaagatatgaaataacttttattttcaaatataaagataaagagatatgaaattttttaaaataaaatctctcctatttgaaaaagactcatatccatatctcttcaacattataaatagaagcatttaattgagataaactatactagacacaaactagaaaaaatttaacttaattttagacatgaaaaatagaatgatgatttattatttagagttccactcatcaaataattgataatagagattcgtctaggtggatacatacacaatcttcatactattaaagaaaatttttgttatttcaagaatgtgcatctatttttttctatttattattattatatattttgaatgaaaaataaatcataatttttcattataatgaacaaactttaatagtgtttgaatggctgacaaaaagtcaaacaaaactttaattttacataaagttttttttacaatttaattaaatataaatcatgtgtacctctcttcgttaatattcttgatgaagaatgacttactaagtttgttcatgattttagttgagaattggggttcgattgctagataaatcacttaatggttgtgatggttttctgttgaaggatcttgttagtgcctcttttttaaggagttattattattattattattattgccacttcttgccattgagagagagagagagaattcttgataaaacaatctttattttctaagtttaaacaattattgaactatactattagcagcgaacatgtttgttttcttaacactagcgtttaatcatgcattgccaaatcattatgtaagtgagttttaataaggatagagtcgttgacaatatgtttaagtattgacaaatttatacttttaaaaatattttacttgtaataaaatttaagttaaactgtactctggttcttctataatttttgtaattttgttccatcaattttaaattctgtaattttaatctccccaatcttttaagatatgcaacttttcaaatgttacagttaatttaatatttaatcatcatcctctctaatattcctcctgtttaattgaaagtgggagcatgtgatgagaaaagttataacattatatccaatgcaattataaggttggcttgtgattgagaaggagatttaacggttgaagaaacaaaaaaaaaagatggtgagtttgatttttttattaatattataacagaaattaataattaacattgatgtgataaaaaaaatattacacccaatactgagttaccaactcatcgatttaactatttgaaccaactttctagaccaaaaacaaaaactattttgacctagctttcaactggaaaaattaatcgaataagacaattacatgttttaattaattctacaatttatgtcggtgaatttcaaccataggctttctacatcagtggacaaaaaggattcttagaaaggcaagtgataaaatggtgaactcacctgtctggaatacaaggatagaaaagagtttcggacattctaaagcgtggcaaagagaagagagaattttaacgctctatggatgatgtttgacatgacagtatttgatggaatgaacatatctgtaaaggctgaaagtagcaatataaagcagaaaacagaattttaatgagctgggagatcgattcttaaatgagttcatgctcataaaaatcttgaggcacacatcgtgaacaagttgtaactatttatatttatacattgcatgctgcgacatgttttaacatatcctattaaagtcttgcaattctttacgtgagttgcacattatggtcaacattctttctattaaattacatgcacatattgccaataaagaaaaacaacaatatgacatttaaaatataatccacagcctttccaaaaacaaatctacagaagcgtttatatgacatttatatagtactagttaggaattttcatcatacccattaaatgagaaatattgacgctattgacatcctttatatattgtgtattacatccacgagaggagaaaaataattgaatattgattaatgcaagaaagtcacgcacatttctttatctatatagtatatttatatgctcgtttctttatgctgtttttcctttgttccctgtcttcaggcagaagcaagtaaaaaaaactagagtctaattacgtactactctttaattaggtcaatgatgagttgtaaacttgaccttttttttctcagtttgccgtttcaaaaatgttccctgtttaggtataaaaaaaatccttgatatttttttatacgttttccaaataaatgacggtaatcacaccctactaccaccttacatggttctaaaaatatatttaatatttattttgaaaatttaatcacctttttatagatttcttagtgtcatatcacgtctcataaattttttactctaataataaattttattttaagatcttaaatcatttttttaaacttaacaaaagatttaccttctaatatttattttaaaataattaaataatttattatatatttttaatttcaaaaaattataacaaatatacaaaatttattaataattaaaatatttatttatcaatataatttaaatttacataaaaattgaaaaaactatagtaatagtctaaaaaaaggggaaaatttgttagtgtgctatagcttcttaccatcttcttcgcccctttaatttctctttttcctttctttcttttttcttctcttttctcccctcacccaccccctccctcttcttccccctcccaccttctcttcttcccccacccacccctcccatctatgttctcatggtgctccgatggtcgtcattggtcgattgtgatggtgtttggattgttatgtaattattttattttttattatttgttttaaaattatattgttatgtatttgttgcatttggacttaattctattgttgatatgtttttcttcctttcttcttttataatcaattagttagaaagataataaaaattgattttttttattaaaaatacatggtaattataaggattctcttacaaaaattaaaccttaaacataaagatcttgaaggtgtttctagtaacttaatcttggaataataaatttttaactttaagatttttctccacaatcatctatcatggatggtctaagttaacgaatttcgatttaggcagaatattgacttgatgtccgtatgatgcataaacaaatcaaaatttatgttggaattaataacctttcttttgactgctctaatgtgtatgcgaaggaggaaaagatattaagcaaggaatcttcttcatttagaattgtccaacccagtgtcctgtaagcttttctataagaggaaatagagaacgaagttcagcttttaaaggcacctatctatgatgattccgttcataggacaagcaacctaaaaggaacaacaacacgaacccacttccccctcccttttcttcaaactaattttatttcttgttttcgtcgacataatataaaaaaacttaaatatttttttagttcttattatttaatatttttaatccttttaatttttttttatttttaatctttgaaattatacttattttgttttttttatctttatcatgatttagataataaaaatattatctaaaatactttaagataaaaaataaaataaacataatttacaataattaaaaaataataattttgaatgatcgaaaaactaaaaatgcactagattgaaagattaaaatatattttgatcaaataagaattattttatttcatataaaaataaaaaaggacggctccaatatacagtacgtcactgaagacgtggcacaaaactttcaacgtattagtaaaaatcaaacgacgtcgtctgtagttgttgttgttgtttatggttgttgttgcagttacccttcacggggtacaacgacgtcgtttttgtccttctcgagccaggcacttcgggcggcgtctgcatgcgaatcagcgccaagttgagccctttgaagaaggaatgcttcttgacgtcagcggcgccgcgcttcgaaccgagccggcgcgccggatccttgttcagcaagccggatatcaaatcccgcgcgtgtagttcgagattgctcgttggtgtggccgtggggaacgccaggggtttctttacgatgttccgcagcgtggcctccttcgatggacccgcatacggcgtgcgaccgtatatgagctcgtagataaagacgccgaacgaccaccagtccacggcgttcccgtgcgaacggccagaagcaacctccggcgagacatactcgtgggtcccaacaaaggaacaggaccgagccgaaaccggttcagcaacaaaaagccggttgggttcaatagcacgaacctcgcgcgacccggaaagccggttcgagaagcaggagaatggagtcataaaagaatgcgagcgagtgtaagcgataggtaatgataaggaatctgctgaggattcaacggctgggattgcatctgagcaaagagaaagatcgaaatcagaaagcatgatatgaccgtctgatctaaccaacacgttctcaggctttaaatctctgtagatgattcccagcatgtggaggtattccaacgccagcagcacctccgcggcataaaatctgggtaattaacattgtgagttcaataaacagagaaaacgtcatcgttttggataaaggttttaaattttaccttgcggaggtgagagggaaacggttgtgagggtgcttgaagcgcagggagtgcaagtctccaccggaacaaaactccatgacgatgcaagagaaatgagaagcttcgaactcagcgtagagcgtagggagaaacgggtggtcgagcatcttgaggatttttctctccatttccgctctctgagacttcttcttcaatgccactgcgtctttgtcaaccaccttcatggcgtataaacaggaagcatcttcttcgtcttcttcctgcttgttgaattggttgttgttggcgtggcggaggcggcaaaggtagacggtgccaatgtcgccggcgccgatgcggcggaggaggtggaagtcgcggaaagtgagagcggccttgcggcggaaggtggcggagcggatggcggagtaggcgaagtcggaggagcggtgaggcttgatggagagactctccggcgaaggagggaggagatcgaaggagagacggctgaaactggtgctgcaaatgctctcgctgctcatggagcttccaagtgaggaagaattcacggtctccaaactcgcctcagaatcacgttcaccaccacaaccactccctaacatggtagtaacactgtacgaaacaaaaaagaagagaaaggagctcggaaattggaatggcaacagtggtttgtgtggaatgaacgaaagtttctgttagtgaaggctttatgaagggttagggtttagccagcacaaaaaaattgaaagaacaataaaagttggatggtacgaagcgtttcagagcaataagagaggcgcagtttgggccagaaatagaatgaggagtgttaaagaaaggaagcgatacaggagaggtggttgcgttgtatttatgctcaacacgtacgtacagagaaggagggaggcacgtgagagaggaagttttggcacgtgccaagtactaatagagaaaaaggagtgggaactagtagggtaggggtgggtgttggtgttggtgtttgtgaggatgatgacgaattgagaagaggaggagttcccacgtggcggaggtttctttggagcattgcttaagctttcacaacttactgagcaatcactaatgagcgtgtgccggtgcaggtaggggaagcttttttcattgcaatgacggaaatatccttatccttttgtttagttagaaaaaaaaatcataaatttacacggcttccacaccttcacctctttactttaatttttttttttctctgtacattcaaactcacttatgggagagttcaataattcagttagttaaagtgttacagcttgtttaataaatgtataaaatcaaaatttttcattcaaaaaatcaattgtttttactacaaccttttttaaaatcaactttattaactttaaaacaaacggaaaccagagttttctaacatgattaaagttaatcctttgattcaatgaatgtgaagaatttcaactgcaagcaatgtaaaaaaaaaaaagtttctaataattgacttatcaagaaccacaaatttggggttggaatcaaactagcttttggcgacgaaagagagtcatgtcaaatgataagaaaggtgatgaatgacaatataatgcctgtagatgcagagacacagtgaatgataatgttcacgcaaatatgcccgtctattgattctaattcttcagccaaaaacgttgttttaatttgctgaaaataatactaatagcgatgtttttggactcacatcctaacacccaggcaccgtcaacggcagaagtgggataagtggtgctacagactactcaccctgatattttgtatgatttcagaaaatgactagaaagaaaatcgtgaaaaataaattaacttatttaatatgatgatagacatatggaagaaaatatttttatttaaatatttctatttatatactttattatttgtgataaatgatcttatctttacatattttttatatattttctcttttcttgactgaaatggatagaaatgaaaagataattagttaataagattttttttctctcctatcatttaacactaaaatattttttatctttactttatctgttttgacaaactttcgtttacctttaccaaaacaaagtgtaagtcttgacgtggcctttctgactataatccctttcaagccactgcatggcatgggaatcttcttgtgcgagattagcctgtgtcggaaattgagtctaacattacagtgcaactgtacagccaaaattctttcttatacatttttatttgtcaattctgtataaaatgagtaagtactaaatagtgagtctattgaatatttacttttactacctctattctacaatattaatatttaaggttaatgtacacatattaaaaaatattcaatgtctaaaatattcgtctatttaatttaatataatttcactaatacaaaatataaatgtggttcattatttgttgatttttttttaaaaaaataagttgtaagcgtagtgttttttttatgaatattgaatctagttattctaaatagagttatatgtgatcaaaaaatgaaactttaaatttatgaaatatcaataattttgaaatagagagagactaaaacatcaatggcttctaaacgggagtaacacatatataattgtaagactgactcttaaacaggagtagtacaaatgtatttagagatatttattctcaaaaaatgatgttagagtcatatttttcaaaaaaaaaatctttagagttgataataataataataataataataataataataataataataataataataataataataataataataataataataataataaacgacactagtcttatcaatatataatgctagtctaatatacacgttattgatattaagtgcaaactaggaaaacatcaggttgcacatgaacaattgaataatgataaatgtattaatgttgtttcattacaacatctttagataaattaggttgtgtccttctgagatattcgttcagtgtcttataccttttcctagtttattaaacgaataagtcttagatttttctcccggccacaatcttacaaaggaaaataagaattatatttataatgatttctatatattacaatcaagattctcatttcatttatccaagtgaaaaatctatcattgggacaaacggatctaagaataattcatttaagaagcattagcatatgatgatgacctggtggaaaaaaaatgttgaatgaccttcttaagaacatgggagcaaaatccaaattatttagaaagacgttgttttagtgaacaaaattgtcatgatttagatttgaagagtgtatatggaaaaccatctaaatcacattcaatggaaaaatttaactttctaaagcagaaaacaccaaagcaagtgagggaagattttcctagagtgccaattgcatttggtgtgactcctacgcaaacacacacccaattttccatgtaacataatattgttgttatttgtaccttatgtcagtatcataagttcctttttttttctaataacgtggcttgttttctttgatctctttgttcattaaatttttttatataagttattaactatcaaagtttttatttgaatttatatcaaatgaacaaatttttaaattaaaaaagacaaataatcgatatcattaaaaattaagaattttttaaatttatatcaaatttaaaaatttattatttcaaaagtatttaaaactataaaaatacataaataatcaaaatgaaatagaattacatatgaatttttatttgaaaatatagaaatgtgcacataatttaaagtatgtggtaattttaaaagtgattatttatttaaagatatcagaaatatttgtaatgacgttgaaagtgaaacaattttcaagaaactgatcttttttttttttctgaatcgagaaattaatctcataccgtggttttatatattaataattgtgaaactttcgtttgtatgattaaactcacgggcacattaattaaattttaacacgctcctgtttgaatttagattttaagaaaatgcacacttttaagtttttaaaataaaaaatattttaaatataactaaaataattcaaagcaagtccttattaaaaaccagcattcaaaacttatctagagtaatcatttgatgtgatatgaaaatgatataataggtagtgtaactatcaccgttcattttatttaaccgatatccaaaggtggtactgcgtgaacgtattgggtctagagggtagggagcagcgggactaataatggcaattaaatgcagaggatcaccctcctacatcttttgcaacacaaaatatagcaaagaaagtttcaaattaaatagaaaataaaaataattataattttttaaaaaattatcttagaaaatgattttatttttaaaacaatttttttttatttttttatcttcatttcaatcaaacaaaataatattatctgtaaattttcctttttattctttttgtttactcaagcataaacggtctcatatttcttaagaaggatattttaaaaaatttagtcatcacttaaatacgcaatgaataaaaaattattcataaattttaaaatacatctgaaattcttatttttattaagatttttattcaatttcttattgtatttttctttaattaattgattaattttcttatcagttatattttcatttctgtttagtttcgtgataaatatatgaaacaactaatcttagttgaaaatatatataataaataaatattgtattaaacttttaaatatttttttaaaaatagcagctagttaaaaacaaaatggggtaataatatcattgaaaatgtttcgtttacacagatcattatatgttacttattgtgtttaggtcaaattcacatatgacacaagatgagtcagcgtgaaaaattgatttagtgcgcaaacaatcttaatgacaatatgatacagtatatgaaatttcacttagaaaaacatttatatataacctgtatacattgggggcctttcgccttatattttcttgattttaggcactacttgtaccttaaatctttccttattaatataatatacatttttgctgataaaaaaaaacatgtatatattattctcattaaataaacatcaagtacaataaaggatgcaaaagtgcggtccatgcatgcagttgacgggaaataatcgggtcccaataaaaaggaataattccctaaaatccctacatgatatttgtattatttgatgctcaccttctcactattgttgatgtagatgtagaagaaattgttcataagggacccatgattgtttggacgggaattggatggtgttttgggaaagaacaacaaaaagtgtatcaaagggaattgttgtgcctggggggccaacgttatcccaaaaagggaaacccaaatacacattactattgatgttattttgtttgcttttgaggttcatgacaaaatttgaaacactacactaactcaacgcaatgaacctagctaactttcatttcatttactgacgtaccaaccagacacccttccatgcactttaattaattcttactttttgttgataattatgttcataagagattgcttagttactaaaaaaaaatatgaagcaataaaagaatgtgccatgaatgcttttaaagaaaactagtatgcaactgcctaaacgaacgagaggagccaataattgattgtcccgatggcacaaaccatactctaaagcagactaattatcaactgatggatagggtcatatctaccaaaaaatctgatttagcaaaacagaatataacaaatcaaactattttgccgatagaaaaaaaaaaaactcacttattgaatagctccaaattctaactaatctctctcaaaagatacttgtgggccaattaaactcccttatggttggtttggttagaaaagaattaaaagaaatatttaaataaaagtaaaaaaaaaaagtataaaactcatactaaattttgaaaatttctcgttctttttcttttatttcttcacaatcaaacatactattatattctacttttttgcggtatttgccgtcttcacaagcaagcatcatagggaatacaattagtacatacagttagtgtgttattttaatattgagtggtgatatataaacacgttatagtaaattaccataatagcggtggaccaaaggcaataacctcgaggctattgcatatagcaacgactaaaattgttagtaaaattagagcaaaagtataaatttattttaaaatatacgtaaatattttttaacgtgaacagccatttgcctgctggccctcaaatggggtgcttccctacatctgagttcgaagagaggacctttccgagaagggtgatgatgtcctgaaataatgcagaacccttctctctattcatcaaaacaagtcaagtttatttcgaggcaattcatcaacatggtaactcatgtgttagcaaggacagtcatctcttatgcttcctccattattttttctgatatttcaagttgtattgaatcgtttatctttagtgaaacgatatgaggtaatgtcaatattaataataaaaaccgtaacagctatttttattttttaaagtatgtgacagctaggctattgccgttgatttttaaaggtttgaattttttaaatgtaagcaatgacctagtcatccactatgataacctgagctctaaaactaaaaaaaaattacctctttatttcgcattttcctcttttctgaaattttgaaaaagaagagtaagcaaagtttgaaattaatgttattgagacgttgaatttcggcatgacaatggaacatgttggaaatgggtatccatccccatctccatagaaggccggatatgtttgagatagaatataaaagatgtgagtttattaaattttaatactcattattctcatttccatcggattttatcaaatttggaaatactcatggatatccggtcccatcatttttttataattttagttcacttataaggttttaaattaattatgtattaagtcattaattatattttaattcaagtgatatataaaaataataaatatataaaagaattaaaaaaattaagaattgaattgtgttttagttatatatatagttttaaatttattagttaattattataataattttaaaccatttatctattaaaataattatttttatataaaattataacaagaaaatcttatatgggtgtgtgatgtaacaaaaatttataaaaaacatattagaacaagtatggataagggtatatagttatttattcatcctcgtactcattcttattttaaaaaattgaataatagttatatatcatattcatatttatatttgatcaaagcatgtatttttttattatcaaaatcgtgacaaatttggatttctttgtcttacttagttgaaatcaaattatgtgaggcgacattaacttaatggtggcaatggtgttttctccttgttcttcttcctgcttttattttaccttttttatggtggttttaatgattgtttttggtttctatgtggccgtggctaaaaaagaaaattacttgcaagtggtggctcttgagctgtggtaatttaggagagaatagaatgtcatcaataaaaatactacttttttttttaatctttgctatttgaattgacacaacaagcaagaccatcccattgccaacaataaaagttgcgataggagctagactagttgttacgccgacttttgattgtctcttttttatgatcttcttgtagtgacacctctacatatcaaaaactatatatcaatattttattattattattattattattaataattattattattattattattattatgattattattatatcatatcacccattatgtctctgtttaatagataggaaaacggaagaagagaagcagatgaaaattattaggtttttttggtggagaaaatttagaggataactaattttaaaattagtagagttcagtgtactattttaacctattttcacacattttttttattctcatccaacctacttctttcctctttactaaaatgagcatatatctacattttttctttattctctctttccctattttggtgttgaatagagttcgatatatcctccaaactttttctttctataaaacttaattgtgtacccgtattttgaatatatacatcagtgaatatatgtatctaaattaataaaataggcaataagttagttaaaatgacttcaaacacataccccttctcatatatacttcaaagaaatttctaatataaatatttatatcgcaatcgcttatcgtttataaatttttcttacttatgaaacaaatcctgcataaattcctttcgtatcattattgtaaatatatttaaaacaaaaataaataaattttattaatatttatcaaaagagtcaattaaacctataagaatcatgatcgaaaaaggaagcaggggaaagaaacaccctaaataatagtataaaatttcgagaatattgtgattatgagcaaattattgtggaagaatcaaagggcaattacaaggaagcaccgtctatggtagaaagaaaacacccaccaatattcccgctatattgataggccgacaatcagacaaaatatgtcacattagacaggaactcatcctagcttgatgtaatgtaaaattaaactttgtatagaagaaatgacatcatgccaccaacttaagataattaaaaaaaaaaaaaaaaaaaaaaacccagcatctttcatgttctttacgtattaattatcttgtctatgatttattataaacaaaagaaagtttaatcattgtctaattagattatagtttcatgtatgaatgtttaggaaatccagtgataaaaacaaaaaacgtaattagtttaagataattattaaatagctaaaaatataataaacagacaattttattaaaaatgatagttaaattatatacttttcttcatttttgttccttctgtgaccatggctttaaagtaatgtttagctaaatgcatggaaaatttgatgtggaatctcagtttctcctcctcggtaccataataatatgatgtccacgccgtatgttgccgaattcttctacattgtttctatgtcttctttggttttataatataaaaattggttcatcagtggttgttcatctaactacagattttgtcccaccatatgatatatgatattaagcctagaatccaaattaaatcatgtgattagtaaggtaatactaaatcacgattttccgcaacaaagaattttaaatgggatagatcgattgagatcgagtcaaccggttttaagggctttaactgtttttataacatagattttggagatgttagtcaattagctgccgtatctatttttaatacgacttctttgtttactatattactttaataatgtaggaaggtcattagtgacatattttgagtcacatgtactcttcatgtggtagtattaataggatgcaatttaactttttaacatatttcagttaaaaactgtttcacataggtccttatctctttgaaccatttagctattgaaaaactttttaacatatttaaataagtctttagtgacatactttagttcataaaaatgcatggtacaaattaaatgtatgcttttagttcctgagtatcttcttatcagataaatggccgaaaaatcaatcacttaaaaatatggtcagctcaaatgttaaaggcttcatctcttcttaattgatagtaatatatatttttatatacatatattatcatgatttaactcaaaattatatgcttaaggaacttgaaaccgttctattattacatgtccaatgggtggataaagaaatcgaggttcaacaaataagaagattgaatttattatttattagcaaactaactggtaacgcgtgcatgcgcacgggtcaagtttgttgtttatataagtgtttaaaaataattaatgtgtataattattttctttaaaaataaataatataatatattagatagaatcaattatttatatcataaccaaataacatgaaaaatctacttattttttaaaaatgataggaaaccaaacattttgatggaaatcaaataatattattttatatttaaatttgtataataatactatagatgtggattaattggattttttaatagagacaatgtgtaccctctttgggatatgatgttgctcaagccaaataggattaatatcgatatcaaaattctcttttacctagctagcaagatttaaatttgagttgagatcacgtgttaaaccaataatcaaatttgcagttgattcacatattttgtggtttaattaaaaatttaaaattatatatacaaattaaaatgacaaaataaaccagtaacacattaatttttttttaaatcaaagttaaataaaattaaataaagatattaatggtccatttatatatagtatatacacatgttttctacttattgatttatgatacatgttttgtgtacattttttcctaatttaagtaaaaattaaaaatacaaattaaataattcaatactataaaatctacaattaattaaaataattaaataatatacataattatatctaaagagaaaaggaatatttacaaaataattcgattttatagaagttgatatttgaacaaaataaatctgttatttaaagttattatatatgcgggtataaggatacatacaattttttaagggttattttgtctttatatttaagatataggaaaaaattatcttgatacaatataaaataaaatttaaatattttaaatcctggtaacatcaatttcctttgcaaatagaaaaaacacagaaaatagaagagaaaaggagaaagaaaattacacgaggtaaaaaaaaaccactgaatgctaacatagtgaaataaaaaatttaaagggtcaaggttcttttcttcaagcttaaagagtaagtacaaaatacaaataaacaacataaagaataatgtttagcaaaaaaatttggaggaccaaaataatagtgaaacaaaaattaaagagtcatacacaaatcatcctgaatttggaaatcacaaattttaaaaaaggaactcacaacccaaaaaccagaaactcaaccacaacataagtcaaagagaacccccacaaatcataaaaatgaataaagataaaagaaaataaacccctgatgcccatctcaactgcctcttgatgattactccagtcaaatccaaggacagtcaccgttaaaatctgttgagaaaagaaaacaaagataataagatattggatgggctcaaattttgaattgagtgaaagaaagaagaggaaaaaaaaaagatgaggaaaaaagatattttgaggcaaacagaactcaaagaaatcacatgcaaatcatcctgaatttataaatcacaaattaaagtaatttattgtgggatcaacaacatatataatttcccaccccttagatattccttctcagccaaatcattggtttgcattctatgttctaaataattgttgaatcaacagttagttatgatggtctgtcatataaatctcaataaccctgaacatagaaattattgaattccagcatattcaaaagttcttccctgttcaattccagttacatttgttaaatacacatacactcccctttcatttcccttctctaataaagtaaatagaaaataaaaggtggaaaatcaagaaaagagtattatttgtaaatgcagatagataagtatttatagagagagaaaaatgagaaagataatgttagcaatgtagaagttcctttatgttactaacatcataatggggttggctaaagaagcaaatcaaaagggaaactggtttcagtataactcagtatctaattctcatcgtattatagaagtcattcacattgaatataaaaccaattagaaacaaattttctccactcagaacaacagtccacattttctaatttacattgaatgaaaagtctaaacctttagtatcattgttttgatcagtagaaagaattggggatgaaactgggcaacagtgaacatgcttttcaaccaagtgaggacttaaggacttaagctcagcaaatatgatttgttttgtgcactccaatatggaaattcaattaaaaagtaagagatcaattttcattaatctctcagtttttattaacaaattataaatctaacccattaaaggcaaaattacccatgagtccatttcttcttatcattttttcatgctcattattcaaactaaaatagaatgaaacaaaattaaggcacaatatatatatatatatatatatatatatatatatatatatatatatatatacacacttactttatcattacaacctttatcattccaaatggagaatgagcaaagcaactgtattccttaaagaattcttactccaattgtagcaatcagcagcagcagctagccaactaaggcaaagatcggaagcctctctcttatctatattttgtgtccttttttttcctccttgacaaagcacctagaatctcactggatggtcatggccttttagtctagtaaatgaaattgaaaaaataacagattttcaaattagctcgagtgatatataacaattgaaacccatatccaacttatcatctaacttcagcgtgaggagtagtaaaggtggaacatagagaagcacattaatatttactgaaacaacttcaaatcaaaagaatcatacaattaaaataaaacattagaattctactccatgaattgtttcaaaggattacgaaaccccacttgcacataaattatgaagaaaatattagcactgcaacacttattagcattctaagatttgtagaaattcatacctccacttattagcaataaaggattaaatagaacaaataaaaagatgacaaatacaatcaatatttattgtagcaccctggattgaagtgattggaaataaatcgaatctgataaaaatgaaaatacagcaagttaatataaatgataatcagcaagtaaatcgaatctcaacattattagtttgtaatttatatcacagaataagaaattattgagagaataaattctcagataaatatccaaaccaagttggaatttaaaaaggaaaataataaaattctacacaatcacccgacacctgttgttttgctcattttggaaatgaaaagcagtaaatcacagtgcaattattttttttttttttggggggggatagaatcttatgttcatttccaataaagcacatttcttcttccagttggtaacttgaaaggttcacaataattccatattatagagatagactatgtttcttatacatttcaggtcaataaaaaatttctcaaaagaaaaaaaaaacatgattgttctaaactcaaagtgcaaatgaagcagaaggttgaaacccaaggtgaatcgggttaaattgacttttagagccgcaataggtgaaaaatgaaagtgatgaaaaataattatgaaaatgtgatgaccaccataaagaagaaaatgaagttgttgagtgacagttttcaacagtgtaaagcagtttttggtggtggcaacagtatagaagaaacaaaaaaagattatgacttttcatggtaccaaactatttcagcctagtagagatcctctaaatctgctcttcacttggggatctaattccattgatgtagtaaaggtccttcaagcaaatttagagttacaacaattgataagatgactgagttacagcaaacctgatcaaatcgagttacaacaaagcaactaaaccaatttaacatgacagagttgaaaccacagagggggcgtttcattcatagaaaatgaaagtaaagcatcaagagaaactggcacaattcatgactcccatttcctattctctcggactcaattaagatgctgggaaatgacactactaagaaatggcaaatttcttctatatgtgcttgttttcttctattctctttccaaaattattgtatatacattctgataacattgtttagaaattaaagctaggaagtatcaattatgtgtatcataattaagcatcaaagattaatctagacatcagctactcattgaaagaaaattctcatcaaccaaaatacagtaaataagctaaaccactaagccttaacccccttgagcatctatgtattgaacttgtaatcgactctgcacacaaatacacttatagattgtcttttacatataacaaatatcagattgactatcatgttgaaatccaaataaagaacatgaaactccttatattgaaagacaagtaagttgttaccattagcatatttgtatttagatcctagattgttatcattttcatttgatcacttagtttatttgctcattactgctaaatgcttctctcttatgcaacatcttggctatgcaattactatacatttaatttagaagtcttgcatatcacccaatacaaaaccattattaatattggtgtatctcaaattatctttgtctttgattgccaggttttttgttagcaaggatagttttttatttcaattcgtttgataatcttttgatgatgtctattgttaatgtacaaaataaattagaggcacgaaatttcaaaatcagaaacaaaaaaaatagtaattctaaaaagaaattataaaataagtgtgaattccaaacatggtcaaataatctgaaacaaaataaaacccaagaaattttaaaatccaacatttccagaatagtcgatagcaatacccaacatccaataagcagcacattgaatcacacaaaaacaaaatatagacatataagcactcatgaaaaatgaaaggaaaatgttcagaaaaagggaaatggggaattaaaacttatgaatgtgatgatgcaaattggaatcattaagagaaaaatataaagtagaaactttaaaaatgttacacaataaataaattgtccttgtgttgatatagcataaccgaaaatgacatgattttttttttcaaaagaataaataaataagagcaatctgtaaatcattcatatcttgaacaaacaataaccactcatatctctattaatttctagctaatatataaataaataaatccaagcacaatattaacaaatatgttacataatgaaagatcaaatattaaaaatcaccacattagtcttaatttagacctgtgcaaaatttactataaactatcaaaatctggtaaataaaaatgcatgcaactattaaaaatctgattgttgtgcatcaatcctaacgatcattataattttataatttataaactaaattattgatagatcatagatcagggccatttggatgggaaggaagaaaatgattttcagaaatgaagtggtgcagagccaagaaattctggaatcagcttaagtaaatgtaatggcttggaaatggcggttaaaggcacagaaattaaaagggattctggtattcactgtcagcatggatgatgaatccatatgcatgccttgaatcaacaacactgagaagtggtttttcgaggtgaagatggtgaggttttcctgtcagattttatcctttgtattaagttctgatatatagaaagtatgcagatgtgatgagtttttgtgtttatgcttggtactggctgatttatcatgaaaagcattctcgtatatgaatgcttggcaaggagcaagtcatcaattgaatgtgcagactagaagttcattaataagtaatggtagaggatgaatttttggaaatatatatatttctgctcttacaaaaatctccattttggttggggcaaacttcagttcacataggaatttttgggggaggggggaaattttatgatttattgtaactgtttcagcttggttttaactcaccttgtgttagcctttgctttttaataataaaaaaaacgtctggacctttattttttttccaatatttattgccaacctagtgactttgactttttaattttctctttctataatcagttattcaaattatagattttttaatcaattgttattgattgtctaattagctaataatcaattattcaaattcaaatacaatcaaatgtatataatcatatcaatattttaggtgaatatttcaatcaaataattttatcttgaaaatactatgtgtaattttttattttattttgtagaactgagaaagtcacgtataagtttcctttttaaaaatatttttgtatgtacatatgtatagatagtttatgacacttttaaattttacctctcatgtattattataacttattttagcgacaggagaaattataatattataaaagaaaacctcatttttccccataaattccaattataacagtgattctcaaagaaaattaaatcaaaatttttataatgagtttgaaacataatgtttaatttttagatcaattcaaattacattaatttaattcaaatcagatgaaactatttaaattttttttatagcaaattgaattttgttgcactgttccaaataaatggcatataaaacattatcaattaatcaattgataataacataggctttatattgcttgcaggactctactgccttttgtagctgtgtgagcgtgaaaaggctcaattgctcaaatgtatcctctgctgtagtctgtcaaagatagtacttgcttcagaaggatgcattctccttcatcataaataattttaaaacaacaaaaagtgaaaaagaaaaaaaaaatgaaatcttccttcaagtaaccggtgattccattgacactgctactcttatagcactagtgattgcatttcacctttcttcaggagtcagagtactaagtaaagcttggaatattaagttctatataacctttggagcaacttggtcatttgtagctggaaacatgagaaacaaaatgtgccttttcctgttcctgttttttatggaatgctatctgggtatgtcatccttctcctttgttagtaccagtttggtcttgtttgtgtttgtctcttcatagcaatctataactcggttttgcttctctttttttccccttcttgtttgcactttcttctctggtttttgtgtttttttttactagttattgagtgtcttcttacttgctatgcagtgtgcaagtttaggatcacatattctttttcttttttgctaaaaggatcacattttctttgaacttactcaattcagcagatcttagtgttctctgcctcttggtaactaatcaataaatcttttttttttcttttttatttggggtcacttccatttttatcattgcaatattaaattttatagcttctttttaggaaggggaaggggaagggggctcattggtttttgttaaccaggtaggcaaaaaatgttgtgacttatgctgatttttgactcttcaaaaaatcagaggaagcatgtttaatgctcttccttgtactcttcttgtcaagtgggggagaacaaaataaaaataaattaatcctcaaaacctacccaacgacccctttgcaccttgtagttgtcttgtaaacaggaaaaaaaaaaaaataacatgatttttttaatcctttgttgagttgcatttctgagtattgtgaagctgtgagttgtgacaaaaaatttgctgtatcccatttgagtcattattttttagttgtaaccttaattttctttttgtgggctttaaaccctaaacccaatagtttattatttatgaaccatacgaaactgtcaattttttttggtagtttttagtttgaaaaggagggatagaaggataagaatgatggagttcaaattctttgcttcatgccacaatccccacgaaataatctaatctaaatactttatatatcagacatgtataactataaagtgatgaggccactttcttttattcacttgttctttttctcgtgttgttaatttatggtggaccaactgttgatgctatcgcatgatcttcacgaaatacaatactattgaatgattggtttggtgttttctttatttatttaataattagtgtaatgattttactggttctatgtctggcaaaaatatttagccatggcaagaggaattgtggtgcaacaaaagtcagaagctgcaatcccagtgacaacattgtcaccacctgaaggcaacactacattcattgatggcactacttggtgtgtggctcttgctggtgtttcccaagctgacttgcagaatgctcttgattgggcttgtggacttggaatggcagattgcacagccatccaaaatggtggaccatgttttgaaccagacacactagtttctcatgcatcctttgctttcaacagctactatcagataaatggcaattctgatattgcatgcaattttggaggaactgctgccttgacaaagcataaccccagtaagttaaatattaatgtaacccaaattctggcccagttgggtaaacttttcgaaaaattctcaaatagaataaaataaaagttaaaattaacttatacatgagttataatcagtttttagataagttatatgagggagcttttagaatttggataaattaaatgagagatcttctataaaaattaaagtgtataaattgattttaacttacaaaagcttaatttattctatcttcttattttattcacctgtaagtgatattgaaaagtttatctaaatatgatctttgtttagtgctgtgggaaattttatgttatgaaatatgggatgaagattccatagccccaccataaaatatgtggatgcattatgtgaagatcgcaagtaacaaacagtttcgcctcttggatcttgggaactttagtacttttcctctttgctattttgttttgatgtctacgtagcatcctttcccttttggtaccatagtgatgctttattaatagcgttagttgttgtgtgatccttgctgaatttctttctggttgatgaatataaatataaatatgtttatacattgatcagctggttgatgaatatcattttgtaaagttttctagaactttcggcatttttctttcgttcttttttgtttgagaagggtgtgaggtgttgaaaagacgggtggttaagcaactaattctagtttacttttgtttgagtgttttctctttttgcatttgcattattctagtttcttaaagtttaaaattaactagttttctttgtaaaactgcaaaaggtttttataacatgaagtgctgtgatgtgatatactgatattcttttagaagacaccagaaggtttacttttcaataagcaattgttttgagttggtatatataataagtaggtacattggattatattcctgatgacataaaagtgtacatattacgcatttttgttggatgctttctgaaaattaagtgcagagtagtggcagcttagtttcttcccctaaattttattcctgcttggtggaattttgatcttagtcttgctagatgaattacttaatactcaaccattggagtgttcacatcagaatgttcatactttgattttgaaatagaattcattctaaacttctatgtttctcttcacttcaggttatggaaaatgtgtctattctacatctgggtatgtatgatgttaatagcataactacatagcctaaattgaaagaagtttgtatacattttattaactcacatttatatcattatatttttatgcgacagatctttagttgcttctgcgccagcttcactgaggaagcataaccaaaacctcgtttggtcgaaacttgctgccttgctactgctttcatacttttggatgtgactatggtcggccaaaccgaggacaaaaggaaaagggaattagaggaaggttagggaatgtacctttgttagcattttttaattgtgtttttgttgctaaggtattcttagctttcatgttgggtcaggacaagaatctctaatcgtgcaaataatctctttttgcagcttaatttgtagttttgtacattattcgtttccctttgtgtaatgttctttttctctgcttactgcccctgtggcccttttctttgttgttgccattagggactatctcctatttaaatatatatttggtttaagtctaagaaacgtttttgttttaatttttgtttcttaaaaatagtttttaattttaatttttaagataaagaatgcgtttgtttccgtgttttatttctttttatatatagttcagtcgtttttaaataaattaaaaagtgtacagaaactttaaaaataaatttaaataattagaatatatttatatttttaattttgaaaataatataagtcaaaatgaaataatgtttttgcaattaagaatgtttgaatgtgtgtattcatttattatagctatgaaaaatattttttaaataataataacaaacatagaaagtaaaagtaatatctatgcaattaattttttttaattcattattatctacatattttttcagtataatattatctacttcataatattaaaattaattgaacattttttttacaattcagttgtttattatacattattctcaaaagatagttgtaccttttattgtattatttatgtccattaagtataaattataattaaactaactattatataatttacacttaatataaaaggccaccggtaaaaggactagctagttctaaaaaaaatgaatagttattcatattgtaaatctgagtttcgctgtttaaataaattttatttttctttttttatataataaattactttatcatgagtagtattttatatttaaatttttaaaaaatgtatattgatttttctcaaaaattatttttggtgtttaattttatcgtgagaaattatttttatagttatcttttcaaaaatttatcttagttttaaatttttaaaatttgtgtcaatatgttcctgacctaaattcaattggctttataattgatttactttgtgagcgaaggaattttgaagtgtttcaagatcaaaactgaagcaaagaggatatcatgattcggttacataagatggagctggtatggaatcatgttaccaagaatcaagagggaactatcaaaaataattccaacaatgttcaagttaataatttcatttgaaattcatcccaaggaaattagttcactcttaattgcgttggtgctagatctcaagcaaatgcaattatattgtgtgatggtcttcttagaaatgatgtgggtgattttatggcaggctttgcttataatctgggagtgagttcagttcttcaatcagagttataggtcatattccatgacattcaacttgctagatcgagaaaaacagattctgcaagtaggatctcaatctgactcaacagaagatatacatcttatccttgatgggtgcaacgaagatgatgtctgttttcagatctgttgagctataaagagcagcattgagcctccaatgatgatgtctttcaagcacattttcaaagaatataatgcatgaacggatgcctttgctaaacatgctctcagtttgtctcataggctggttctttttcatgcagacccataattttgctatccctagtttgttggcggagaaatcagcaataggaggattgtatatgtgtttttctggtatttttttcgagctgtttaagcccttgtaagtcaacaaaaataatagtagttagactaaatgcattgcgatgtattttcacgttgtcatgcaagcctagtttcaagaaaatgcaagtctggcatccaaggaattaaacaaattactttgcttactcccttatgtttggtaccatttatgctacttgcttattaaattatgcaaaaaaataatctaaaaacatttctaatcataaaaaaatgttatacatttataatgtaaaaagttatataggtcattcatttacaatctatcgtgcatgataaatttattgacttttaaaataattatcttaaaatattttaaataatgatttgtgattgaatgataaaataaaattgttttacattacccatgcataaacattaaattcttgtaattattatgccaattgtatcaatcatgaggtttactaataatttattgaccaatattgtgattgagtcaataattggtctaatctcaatattgctcataatatgctatcaagaagaagaaaaacttcaaataatcaaaccttacttaaaaaattggagattgcggtatctcactaaaaagtcaaagactgagataaatgacaaactaagaaaatatttataataaatataatgaaaaggaaaaaacaaccaatatgatgttagttcaagtggaaataaaatcaaaccccttaaacaaaatattatatttaaactttatgaatgaaaaagtctaagtaaaagaaaaatttactaaagataattaattaattattggcaaagtttggtagcatatactaataagttaactaaatgataaaaatttcctttaaaaagtgaaatttatgtccacaaaatccttaaaattcactatattttaacttttaagccttatagataatttttaatttcaaattgaggtctttaatctttattacttaagtgtgaaataaattttttcgaatttcacatacaaatagaaaaaaactaaaatttgaatatctatttttacggtttaaattaaaacaacttatattttacttatttttatttaaaatgttttgaatttataatttaaaagtacgcttaaatttaaaaaacatacaatataaacacttatcattatatgttattttcaataaaaggaaaaaactaaaaatggaagaaaataagcactcacttcgatgttgtgaaaattgatcggaaccagtacatcagatctgtccaaccagtatccggtggcataatcgaactggtttagttattggaccggccatgtatctaaccctagatgacccggccagaccttaccgattttgcagagtgacttggtgatccaatcgatttttgaaatttggtctaggtttcactttcacttcacacctttgtcgccttcacgctttgactgacaccatcccaccacgttgtcgtcaaaacaagaaggcagaaatcgttgacaaaggtagagaaggcataaattgtcgcttcacgctttaggtttctttgacgtagagcaaataatgtcgtcgaaaaattgtcacttcacgctttgggtttctttaacgcagagcaaagaatgtcgtcgaatagtaacccatggaaggcaactatggtgttataggagggaactggagcaaaggtggtggctctttttcagacgaaaaggcgatataggaaggagagagaatgcacaagagaagaatgatggccaacaacaagagaagaatatatattagggattagaggttttttagttggacttgggcctaattttgctagatattgattcgtgcatcccttttattatgcggtttccattttgcatttttaaaatggacttctacttattttatttattgaaaactagacttgtgttttaagttagataattgttatttaaactcttttatattattaacacattttatttgtgttatcaactttaatatttcaatttttattttagatttttgagtttgaaattatggatgaactttttttaatcaaataatgttaattatatatatatatatatataatataattttaaattttttaaaatagatcaaataaaattgaatcaattattggtaagtcgattggacaactgacctattatctcacctaggggtgggcattgattgaatttttaagaattcaatccatattcaattcatatctatttaaatggattgtattttaaatccatatccatattttttaaaaaataattcagactcaagatccaatccatttaaatggatattgatttggatatatttaatttatattcacttaattgttgtaagatttttttttttttacaaattttagttattaaatgctaaaaagtgaaaactaagtacttgtccatttaaaagctattttcaatggaccttagttaagactatttttttttatagatattggttagtgtatttttgacatatctcaaccaaagcaatttcgacagatatcggtccagacaattttagactgacatcaactaagactatttttttgctgacattagtcagtgcattttcaatcgacattggtcaatgatgtttttggtcgatcttagatagggttactttttggttgaggtcgccaggatttttagtcagtacatttttttgtcgacatttattaggattttgtggctaacattgataaggtttttttttttccgatgtcaatcattgatatttttttgccaacattcgtcaggacttttttttgtcgacgttagctatatttttttgtcgatgttggttgaaactatatttttgttggcaacaactaggatttgttcgatcggtgtcaatttggagaaatattttggctgacgtcaactaggttttttggctgatgtagatcgatattttttaaccgatgtcggcaaaaaattgtctcgtctggcgttgacaaaaaaaatcatagtcgacgttgagcgaaaaatctacttgatgtcgacaaaaaataatttcgacatacatcgataaagaaaaacctagctgatttcggaaaaaaaaatagtatcgactgatgccggacaaaaaataatctcaatcaatattgactaaaaaaatcttactaacattaattgaaaaaatagactcaacaatgacagtttaaaagtatcattagttaacgtcgaccaaaaaaatagtctcaatcaaagttgacaaaaaaaattgacaaaagaatctacatgatatttttgccaaaaaattagatttaaaaattcaaacaaatattcaatccatattcactttatatccaattaattggattagatttaaaatctaaaaaaatatatttaaatataaaactaatctatttaaataaatttaaaataaattaaattgaattagataaagattattatgtggatatgattttttttttccacccataatctctacaaatcaataagcgggcagagttttataacactgattcacttcactttacctggcgcatcttcgagacgagggcaaaagacaaaagccgcccaagggagggcctgagagaaagtgtttgagtgagagtgaggtgcttgttgtggggcacgccctaaccggaagcggttaaccactctgaaccgaactgaaacggaaccctattcaatttgtaatctcagaacactagaatcagagtttgtattttcgtgtgtgtaagagaagagaacgatgagtatatggaactacgtcgtcacagctcacaaacccaccaacgtcactcactcctgcgtcggcaatttcaccagtcctcaagacctcaatctcattatcgcgtatctattcatattccctttcgttttcctagggtttcatttcttctctttcaatttcgtcaccgtttatttaccctttcacttcgttttttcttccaggaaatgcacgcgcatcgagattcacttgctttctcctcagggcttgcaggttcttcctctattccatttcacaggcttcttgttttaatcatttttatttgaatatgcattctttttttggattttgttgtcttctgttttcaacggaaacctctctttgcagcctatgttggatgtgccgatatatggaagaattgcaacacttgaactcttccgccctcatgtgagaaaattaaaagcatacgtgttttttgagttattgtctaatgttgtagttttattcttccataatgtattttttttgtttgtttgttttggtttcaaacagggtgaaacacaggattatctttttattgcaactgaaagatacaaattctgtgttcttcaatgggattctgaaacttctgagcttgttacacggtatgtgtgaggaagcatcaattctttcctttggagtggacttccttttgttcagcttgtttttgtatagattgaaatcaacattgtttttaattttaagcaattatgatgtaggggttgtataagctgttagctggggtattaactatctcaatgtgaattttgttatgcaataatccagttagtttagaatagggtactttgtatgcagtgtgtaaaagagagtttcataactttgaagcatagtatctttgttaattgactaactacttcattagttattactgctaagctttctggtgctgccagatgaaggaatggggagaaaatatgtttctgacatgtattttgtatttgcttgcacttaacatagcacattctttctgtatgaccagaaagtccagattgatatgcttgagtataatgagagatatttttggatgaaatgctaagtgttttctcaacactcagcttctcttatatatcaaacttagcttacaaaggaagcttttacaggaaactcagaacagagcagatacaaaaagtcaaaaagaacagtagcctagtacaatggggatataataacctattttctaacattccccctcaagttggagcatataaatcatatgcaccaagcttaggacataaaaactgaatcctaggtcccctcaatgacttagtcaaaatatctgcaatttgattatcagagctaattttttcagttctaatttcctcagccaacaaattctctcgaacaaagtggcagccaatttctatgtgtttggttttcatggaatactggattagaagcaatatgaggtgctgcctgattatcacaatatagttgcatctgctgaacttcacaaaatttaagttcttggaggagttgtttgacccacgttagttcacaagtggctgaagccagcaaaaaaattatgtttcttgctcttccaagaaatcagatttcctcctatgaatacacaatatccagtagtagagtgtctgtctgtaggagagcctatcacaatacccagtaacatgggtatttcccctgtcttcatacaacaattcctgtcccagagcccttttaatgtaactaagaatgcgaattacagcatttcaattatcaatgtgaggagcctgcataaattgactaatcggtgataactcaaacagttataaataggatgggaatttctggtagatcgaatacctttcttaagagcaattgggcacccagagtcatcctcagttggaaccgttgtacaaatagctgaaggtgaccaacatgaagcaaaggactctccatgtgacacaggactagattactctatttgtgtctcatactagtgagtagtgtgaggtgatgaagaaaggctggttggagaggtggcttgatttgtgtccataatagggatttaatgaattggagacaatagtggatcaagtgatgggacaggtaaaacttgttggactaaattgaaatcttgcattgaagaagagaaaaagcgagtttcttcaaagaagttgacatttgctgacatgtagtatcatctagtgtttggtaagtagcaatggtaccccttttgtagacgggagtagccaagaaaacgcatttaatggcccttgcaaatagcttgtcccgacctggagaaacattgtgaacaaaacaagtacaaccaaaaatacgaggagagacatgaaataacggttcacttggaaagagaattgagtaaggaattttattctcaggagatgaagatgacattctattaattaaaaaacaggcagtaaggatggcatcaccccaatgatataccatttttctttctgctatagcattttgctatggtgtgttaggacatgtggactgatgtaaaatgccttgtggttaaaaacgaagagagattagaggagaaatattctttggcatgatcattcttgagacggtcactggatgagggaacatagattgatatggtttggacacgtcatgagacgatcactggatgttcccgtaagaacaagagtttgttaccaagagcttaacataaagagaggtagaggtcgaccgaaacttacctaggaaaaggtagttaaacaagacctaatggagtgggacatagattgacggacgatatgtcttaggacggagcagagaaaaactataagtttggtggagggttaaacgaattagtagtttcatgttccagtcgttcccttttttagttcttttcctcttcttttctcctccttgcacccttcttttattttagtttatttttcctttgttttgtcttttttccactttttcttcccctcaccctttctcattctttgtcttatttccgatttattattgggttcgtccaccatcgatcccaattaacttgggttaaaggtgttgttgatgttgattatcattgtcttatttcaaaaccgggtcttgatttcattaagaaagacatgaatataggtaaaagttcaaatcaatctttcattaaataagcccaagtagatctagagtattcatcaataaaggtaacaaactatctgaaaccaaaagatgtggcacgacttggaccccaaatatcagagtgaaaagtggaaaaagaagagttacatcttgtttttagttctctttcgggacctaacatgttttcctaattgacatgattgacactctaagacctgacgcttgctgagattcgcaaccattttcttcatctctgacaaatgtggatgacccaagtgatcatgcaaaagtttaggagacaaagatgcaaaacaagacatagatgtgttggcttcaagatagtagagacctctgaattcatgtcctacgccgatgaaccgattcgttccaagttcctgtataacaaaggagtcaacatcaaatgctacagaacaatttaatgattttgtcagttgactaagagaaactaagttgagggacaattaggaacaaaaagaactggatccaagtttaaagaagcaatggagactttgccaactcctttagaggcgacattggtgccatttgctagggtgatcagatgaggaaattttggaggagacatagaggtgaataaagagtcattaccgaaaatatgattagaaacacctgaatcaattgcaaatggaccttgactatccacaaactgagaaatgcaagttgttgaagtactcgggcttgaagatgattgagcttgactgttggacttcagtcgaaggtattcttgatactcctcttcaaaaaacttaggatcaagtgtttctgattggtgacatttgttgttttatcagtccagccaattatgtagtagcatgtcttgggtgtggcctcgcttcttacaatgtgagcatcaaaggtttgaattcatgtttctaccaccaccatgtcctccacgattcccatgatcccctcttcctctagtagcaccattgttgaagattcaaaatgctcaaatgagtttccaatattccttggggtctgggaacatgaagaaggcgtgtcatgaggcgatccattgaaggaacttcttgactagtcagaatttgatcacgaatatgatcaaaatctggattcatggcacgtaaggccagcaccatatacagattgtcatgcttccttttcatttccttcattgactcaacatctaagagcatatttagtccttcaactgcagattggatttgagcaacaaacaaggtcatatgatgatctgtttgcttataagatgtcaactaggcagctgtatcatacaatctctgaatgtcattggcatagatcttttgggccttttcccaaaaagagcaacaagttttgaaggacctcaaggttcctaagatattttgctccacagactgccacaacaaggtaaaaagctggaagtcaagtctttccattgttcctaactttttgctagtacttcagtgaactctttctccaagtgattgtgatgcccttggccaaggaacagagttccacagatatagaccgggacaaataattgttactatcacccagcttctctgaggttatgacaggtgtcctcgagaaagaaattgtgggactaacagaagaagttgtagaagaggttgtagaggcatcttataacaaggaggagttgtgcaaaccaagatgccaaactcgcacagacagaaccttcaagaaaggttccaacttgagaacccaacactactaatgagagataatgaagatccaggaccagatctaggtctagggagatttgcgagttgttctgtactgttgtggcaagtttccgaccagtagagggcggcgcgtagacttcacacgccaaacaaaaggctctgtacaagtggcgtgtggaggcctttttggctgtgtgacttgctgggttaggtcacgctcactaaggcgcatcaaaccttgggttcgccggatatttggccggcggcagcaaatggtggctctggtgatattttgtataacctctttctgatgtgttagaacttgtgaagaaggaaattagtatcccttagaacttgggagggaaacatttagttgttgggtaaattgcatgcatctgacttccctagacggagtcttgtgcattaggctgcctcttttactttcttttgagtgggattattggttgataactttgtactttgagtagtgtcttgagcatacaagctaggaatttctgtgaaaaattaagattgaaatgttgtcggggtcttgacattaccttatgttaattgaataggtcttgtcggggtcatttaggaccctaacaggactttggagttggagttaagctgggaattgtaagtcaaaataagaataaaatcccaaatccctaacttaaatgtgtgagttcatgtaagtttgagagaatgtacatatggggcaggagacaggagaggaaatcctcctaaaaaatgaaaacaaatagtgagccaaagtagctcaaagaaacagttaggctgtccaatttctgtatattatatattataaattgaaattccttgtaagggcatgaatggttggctcatttatttgtttaattctctttgttattgtaatccagggcaatgggggatgtttctgaccggataggacgtcccacagataacggtcaggtatttgaattgttttacttatatctactgataaaacttgggtagttatagtattctttcagttttgatatttttaacatttatgctttatctagtctaggatcagttgaaagttgttcagtgcatttcagctgttattccattttctttctgcagattggcattattgatcctgattgtagactgattggactccacttgtatgatggtttgtttaaagtatgtaactgcttctcattcactattctgtaaaaatattagaagattagaatgacaatatgtttctgtttagtgtcacgttaaagtatttgaatgattcactgttcattgatcttccaggttattcccttcgacaataagggacagctcaaggaagcatttaatataaggtaaccatattattatcttggttttctaaacatggattctatttacaatttgacctttaatataaggtaaccatattagtgtctgttctgctttgttcttggtagggtgtattcatagcattactacttgcactgctactactatcttttattaatataattatttttgctgataaatattttttcttttacaatttgacctttgctaggtatgcctaaatgtagtgctagtaactatgagcctatgaccttgattaaggattaccagttaccaaagccctggttgtgtaagaatgaaatgcgaacctatgtcaagttggatattgttggtgtctttacataagattgaaaaaagtcgattctgcatctcatgcatcaatgggtcaatagtgaacttagatatagctttctttgaaagaacaaaatgaagtatgaatatacatttattagttggtttaatctatgtgtttaattgagatggttttaaaatccaaactttctcctgtacagacagttaaaaattatataataataataaaaataatactggttcgaccatggttaaactaatgccttaattggttcgatgatcggtccagttttataaacattgagcaaaattgtggatgtcatggtggagctaagtcatggatgtaaatgggtgtctgtacagtttagtttctttgtatctttttttcatgttatatccgctgtgactatggacaatggctgtgctgggaaaacaaccctagctttgtttatgctttgctgatctcatagtggcttgctagtttgtttgctttcagttttaaatgttatgttacctaagagaacattcataaaatatgggtgtaagttatttgtatcttttttggttgggagcatagcagtatacttttgctctaggatcaagtttactttcatttggttcatgcgtatgcacaaaaacagtacagagtacacccaaatattcttagaggtaaagtgaatgagagtctattatttggaaaaaaaccttgtgagaacatcaaagagttttgaagctcaaaactttgctatacttgtttttgatcaaataagttccaattaagattgctttcaccccaaagatattttggtgctacattttgaaacaatgcctgagcaacttctagtatatgcttattttttgtttcagtcactccattttgttgtggcgtgtcaacacaagacatggtgtgcagatacaagatcagggctgaagctttgatactatataattttaggagaagaaaaagatattctgtattattgattgatttgaatttacatgatttataaaggcagagctgacaaggagagatcctaaccaccctgattatggaataaacattaggataagatatggagaaaataagggagaatcagatcagattattttgatcttgattgttactacctaactcttcttgaaaccttatttgaaatttaaaagaaaagcaaatactgttggcattttttaaattgaaaatgtttttatttataatttattttttgtaattttcttccctactttttctttttcctcttttttgtttctagttctgatatagtttattagaattatgatgcatttgttttcaggcttgaggagctccaagttttggatatcaaatttctttatggttgttcaaagccaactattgtggttctttaccaggtttctaattttattctacctattgtcattttgttttgcttcttttctttactctgctcttttatttttgtctttgggtccacgctaaatgcatttagaaatctagtgctctataacaggaggctaaatttgtgtggctgcatgcagtttaagctgtcctttggcatgtgtagttggagcagaatgcttacacctttaagggtgtattgttgccccaaaatttgttatgagggaattatgcttgtgcttcacaattttttcctgatggagtcttacctccatttggcctaatgattgtttatacagtcagcatggaatcattataataccatgctctttctctgctttttcaaaataattcttttcaatttctaatttaatatacatttgagacacagaagaagaaaaaaatacaggaaagttcttcacataatttgtgttttagaagtgacagaagagtaagtatcacatcattcacatgaacttgtattagaattgtttacacaaggtttgagacaaatttaaagagtgctgaagactgaagagggtttgtaacccatatgttataattgtcttgttttagtttcagtttatgggtgggcatattcatattcttgcataatttgtgtattcaatgttgctatgatttgatcatctatgaatatgtctgctgcatattttaatttttttcttgcatttcctttatgcaatactatttgttggaaaaatggtgtttagcataaacaattttgattttgatggatttgttactgttttcatcaatgacaggataataaagatgctcgtcatgttaaaacatatgaggttgcactgaaggataaagattttcttgaaggtccatggtaccagaacaatcttgataatggggctgatttattgataccagttcccccacctctttgtggtgtgcttattattggggaagaaaacatagtgtactgcagtgctaatgctttcaaggctatcccgatcagacctgtatgttaaaaattattttttgtacttccatttaaatcatctgtgattttttgaaacaagtgcatttgtacaatacgagttattggacttcccttccatcttaattgtaccttttgtgcttttcagtcaattacaaaagcctatggaagagttgatcctgatggttctagatatttacttggtgaccatacagggttgcttagcctacttgtaataacccatgagaaagaaaagtatgtgatctctcattctcggcatcagtatattgattgaataaacaatctgtatttttataaacaaacaatagaccactattttaactgttgaatcttatggtttgtcatttacatttattttatagggttactggacttaaaattgagccccttggggagacttccattgcatctacagtatcataccttgataatgcattcgtctacattggttcaagttatggagattcacaggtgggttaatgaactggaaaattactttataaattttcgttttgtgagaacataacgtgaaagttaattatttccaaatttccgtctccccaagcactagttttgaactattatggaagctttgacttgtttcattattttaatgtgaaatggaatctgtagcttatgttgggttgattacttattaattgtattcagatttgagaatttatgactcttgaatgtacttgtttaaatatagcttagagagcataactttatttatatagtaaatagcaaggctgtcaaacttgagttgtaaacttgagacttttgaaatattacttaaaatctattgtggaaccccaaacataatttaacagcatatatataatatataatgggaggggatcgacttacttcaagagtaattctcctcatcctcaccattcattttcttgagatctaatggttaagatcagttacttattacaaccattagatcttaagaaaatgaacggtgaagatgaagagtaactctaaaagagttactcttggagcaagtggatcctctcccatatataatataggcttaaatactgttttagtccctgaatttggggtatgttttttttttttttaaatccctcaaatttaaaaatgctatttttagtccctaaattttgaaaattgcattttttagtccctgatataataaatttacactttgtgacggtttttagctgtcttaaattaatttttattttttagccacttgaatttgcatttaaaaactgtcacaaagtgctaaaaaaacctgccataaagtgcttaaaaattgccacaaagtatcaatttattatgtcagggactaaaacgagcaattttcaaaattcagggactaaaaaaagcatttttaaatttcagggactaaaaaaagcacacccccaaattcagggactaaaacagtaattaagcctataatatataataaatattctgacattccaactccataacaaagtaaatgaaatagtacagtaagaacataagtacaaaagggacctgcatcaccaaaacaatcaagtgtttttcttaggatattttcttttcttctaatttttttactctaatataagataacaaggaagggaaagaacatatctgtatcaggaagcttttgcaatatgtgaagtgttttcttcattgccttttctattcatgttgctttaaagtctttggaagtgtagtatggcatatccattgctgaatacttatgcttacatattcagacataacatattgacaatctctgatgttaaaatgcagctaataaaactaaatctacagcctgatgcaaaaggttcttatgtagaagtactggaaaggtatgtcaatttggggcctattgttgacttctgtgtggtagacctcgaaaggcagggccaaggtcaggttgtaacttgctctggagcttacaaggatggttctcttcgcgtcgttcgtaatggaatagggattaatgaacaggtcagctccccttcctccaccacagtgtggaacatttgcacccaagacactttcaaaaggaatggaaattgggaaaataaatctttatatcaatgacaaacaccttacaaaatattaatttttttatgcatgtatttggtctaggcatcagtagaacttcaaggtatcaaaggaatgtggtcacttagatcctcaacagatgatccctttgacacttttctggttgtgagttttataagtgaaacaagaatcttagcaatgaatcttgaggatgagctggaagaaactgagattgagggattctgttctcaagtgcagacattattttgccatgatgcagttcataatcaacttgttcaagtaggttcttaccttattttcttaccatattgattttctgtttatcttgatttaacacctacatctctctgactaaatttaagagaagtggtggttaagaaaactatttatagctgcagagttcttttgtcatttgcttatggatttgctatcaaattttactgttaggctgtctatttattatgttttcttacaggattgctttcctttaattttcaaactgtttctcaaccaacccaatattgatcactataaatatataccctttttggtataataaaaccttttattttagttttctatttttctaaaataattagtggcatgttttatcttctgcatataaaaattacctgatatcaagatatcagtatagatgtgtgtataatgtgtttgtgtatatttttatgttttgaattttgacaaattttgatttcttgtcaaagaattttttttctctgtaactacacgagacagaagacaggactgatatcttagtacctactatgatgtatgttttcaacaggtttcttcaaaatacaaaatatttgtgtcagcttctttttggtttctttgttttaaaaaagattgtccattttgtgaaaaattaataagaaatttatttagagtttttggataatacaaagctgtgggtaggtcaaaatcggaatcaaacaataagaattataatacgttggaactttaaagaaataaagatttaaacttacataatgtgttaataatcttgaaacttcttttgtaagcttaagttctgcatgctcctttgtagttaatttgaataattttcataaattgattccataaattaattaatgctattctgctgtacacttctatgctttttttgtttattttattttgttttatggcagacacctgccattagctaataaatcgaaattacaggtcacatcgagctctgtcagactggtcagctccacaactagagagcttcggaatgaatggcatgcaccatcaggctattcagtaaatgtagctacagcaaacgctacccaggtgtgatttgggtgctttacaaaaaatgttatgtttaaaaattataggcgatatttgtttagtggttttttaaattccaattggttccctcgtcaatgtggcttatctgagtagaggcagatcagagtctgacacattccccctcccacttgttccgatggaaataattttgatgtacattagctgtcaggacgatggaagtagtgacatgagaagctccttatcattaactttaatatgacttgagcccctgttttgctattagctgctagagttatttgggtgaaattattgtgtttagaaagctataggatcattgaagtagaatgtaatgctaataaatgctaccttgggttaattcttaaagataaaaggaggaagacagctgaaggcatgttgaattagtaattgtgacatatttgtcattggtttatggaatattttttaagtaaatgactttatgacttctgtaagtatgaaagacgaatatttccttttcagtctatgttaggtgtgagggctctagttttttaatgcctgcttccaatttttcatttacttagagaatcatgttctttgattcttcaaggattgttttttggtgttcagtgaagctctaagcatgaaagatatttcctgaaggtgcagtaaatgttagttaggtgcgaaggctgtagtttttaaatgcctgctcccatcatttcatttacttaaagaatcatgttctttgattctccatggattgtttttggtgttcagtgaagctccaataataagttattctacatgaataagaatgtcttttatactgataaatttgtttgttttctgttttgatattttaattcagattgtgtaatatttattttgtcctatgttttttaataatataaaacaataatccaataacagtggaaagttaaagctaaaacaagttaatgactcagtggcagtgtatattttacttattttaattccttaaagttgaaaggattttgcatcactgcaagactcctccaaagggtagagaactccagattctgatatcttaaagctacagacaatctacaaagtaatataatttgtggcaaattccttggaataagttttatataacataagaccgttgagccaaacatgattttgtttaattggtatagaaatactagaattaattttgaccagaagtatcagtatttttgctactggtcaaacaaatgttgtgctttgcagcaacttcaaaacttggcctttgatgtatctccacgagtagttttggtatggtatccaatcaagctccttggaataagttttatataatataagactgttcagccaaacatgattttgtttaatttgtaaagaaatactagaattaattttgaccagaagtaacagtattttgctgctggccaaataaatgttctgcttggttgcaacttcaaaacttggcctttgatattatttctggatctctacgagtagttttggtatggtatccaaccaagctctactaaagttaccatttaagagaatttgcttcaatctatttcattacttttacactgcacatttccattgttggattttattatgacaatacatattgagtttgcaattaaattggtaattattgttacacttggacacaggttttgttggccacaggaggagggcatttggtttaccttgaaattggagatggcatattacaggaagtaaaacatgcccagctggagtatgagatttcatgcctggacataaatcccattggtgaaaaccccaatcacagtcatctagcagcagttggaatgtggacagacataagtgttagaattttttctcttcctgatctgagtctcatcacaaaggaacaattaggaggggagatcatacctcgttctgttcttctttgtgcctttgaaggggtaggctttcgttgagttattttttgtacttggttttgtttttttgattctagcattctgctttcttattttatttcttgtaagttcaatttgaggtagagattttggatttttacatgtgtggcagttgtgaggaatatacgaagatcagcaacattaatatctttttactcttatgctcatgttaaattgaggcattgcttagctttcaatgtcacaagttttatggtagtttccttaaaaatatcctattaaagtgtgttgccttgtcaatttatcctccagatatcgtacttgctatgtgctctaggtgatggccatctcttaaactttatgttgaatacaagtactggtgaattaacagataggaaaaaggtatctctagggacacaacctattacactacggacgttctcctccaaaaatactactcatgtgtttgctgcatctgatcggccaactgtgatttacagtagtaacaaaaagttactttatagtaatgtgaatctgaaggaagtgagtcacatgtgtcctttcaattctgctgcttttccagacaggtatcttggtctttgttagtttgacttactagagttattgacatatccccttgtgctgttcttggatcttgttcaatttaatgtaaaataatttactggtaatggtactcatctacttttaataacttaaacagtttggcaattgcaaaagaaggtgagcttactattggcaccattgatgatatacaaaaacttcatattcgctctattccactgggggagcatgcacgacgtatctgccaccaggagcaatctaggacttttgctatttgtagtttgaaatacaacccagcaagtggtgaagaatctgaaatgcactttgtccgtttgctggacgaccagacttttgagttcatatcaacttattctcttgacacttatgagtacggttgcttcataattagctgctccttctcagatgacaataatgtgtattactgtgttggaactgcatatgtacatccagaggagaatgaaccaaccaaagtaagttgagaaatttgtattttttcggctttgttctagtcaaagcttctgatatcctgcttcctgtggccattttaaaacatgtagggaagaattcttgtttttgctgttgaagatggaaaactacagctaattgccgagaaagagactaaaggagctgtttattgcttgaatgcatttaatggtaaattgcttgctgctattaatcaaaaaattcagctgtataagtgggtgctccgggatgatggtacccatgaattgcagtctgaatgtggacatcatgggcacatcctagcactttatgtgcaaactagaggagattttattgtagttggtgatctgatgaagtcaatttccttgttaatctacaaggtaaattttaaactgttgtgacactattttctgtctggttttgttaaatttcaactgttgtgctgcttatcgttttggatgaataactgatttttgtatatataatgagtataccatgttcttttggaatgataaatttttccttattgatagcatgaagaaggtgctattgaggaaagagctcgtgactacaacgcaaattggatgtctgccgttgaaatcgttgatgatgacatatatctaggtgcagaaaacagttttaatctgttcactgttcggaaaaatagtgaaggtgccactgatgaagagcgaggtcgtcttgaagtggttggtgagtatcaccttggagaatttgtcaatcggttccggcatggctcccttgttatgcgcttgccagattctgatgtgggccagatcccaactgttatctttggcaccattaatggtgttattggagtaattgcttctcttccacatgagcaatatgttttcttggagaaacttcagtcaaatttgaggaaggtaattaaaggcgttggagggctcagccatgagcaatggagatcatttaacaacgagaagaaaactgttgaagccagaaactttttagatggagatttgatcgaatcatttcttgatcttaaccgcagtaagatggatgaaatttccaaggcattggacgtttcagtagaggagttatgcaagagagtagaagagttgacaaggttgcactgattttatattgttttgtagttttgtagtttcgttgttttgttttttttttttctcatttaactttgttctttttgagaggttgggtgggggttaaaataacatatatgtttgtatttttccccccgcttttaacttctgtttgcatttcacaatacatggagatcacatagtgtatgatatgaatgtcatgttctaaggcatgatagtgctttcacttttggacacgctatcattttcctaatatttgctttcaagttagttatacgttgcagttctgtcaagtgtcatgttaacaagcgaaacacgcatagaaaatctggtcagatttgacgtccaatatcaagatgtattttaacattgttcaaaagttttagttgaacattaaaaaaaaggtaattcgaatgatttttgagacaaatttggtccttgaaaaaatggtaaatcaagttgattttcagtcattggaggactgtcactttgatttcaccaagcagtagtagtcttttaattattttaatttcaacatatgtaagtgttaagttgatctgtttatgtaataatcttttaagaaaaaaaagttatttggaaaattcattgatggcaaaaataagttattttaaaaaaagatcaatgttatgaaaataagctgaaatggtagatcaaattgataaaattgaaatggcaaaatttagatttaagtattttattacatcgatcaataatatttgaatattattcaaagtacatgatttatttaagaattaagaggattaaaagggacattatttaaattttgtccgtaaaaaattggttttggactggtcatctacaaaattggaatatgaaaaactgataagtcagttgtgaattgtgatcatgaagcgcttaaactgtacagttttgtcactttcaaatggagaaaaaagttgaaagtctcaatagcacgagtggcatcaagtttatattcagaataatataaatggcatgcatttaatatcttacacgacaaaatttaacttttgggacgcgaggacaaatgccagagtaagaataccaaccgttcctgagtatgaattcccctttatgaattaattaacaggctacctttcaagaactagtttttattttattattacaaaaatagggcttaaaggcatgtatcagcttatttttatcgtgtgtgaatttgaagagagaaaaaattatgcaactctttctctaattacaggataaagatactttaattagttcagcaaaacttcctcatgggcataatgaacaaattcatgcgaatttgtttttaaaaatattgtgatttttgtcaaacacctcccataaccccagaaaaaaagatgctctagaactataagcatctagtcattgtttttaaattacattttcaactaccataaagattctgagatacccaaaatttctttcagtaaaatgaattgtagctatacctgtgtctatctaatcttcaaataatattgagctgtaaaccttattccataatattacatctaatcagaaaatgctctcccttgctaagatagcattgctgatatatttggtcattgacagatcttcacaagaggcaaaagcgggttaaaagtagtaatatgcaaacatccctcccatctaggacagatttcaaaattgtcactaagtcaaaccacattaacataatggctaaagagaaatatcacattcacatatatcagcaagggttttgtagagggccatctgaatcatattcagaaaacatggaatctgattcgtcctcagaactaagctggttagtttttttagcaaggcaaacctcctctccagaccctccaccaaattaatgtctatgttttttttgtatacacccctactcctatccggtagccctttcttcagcaggcttgagaattcctctctaatttgtagaaggggatgattcagcaaaggttcctgaccattataggcctccctaagaacaactgtttgggtatcactcttcttggaaatataaaaaataccaggatgacactcaaatactttaggctttgtttgggagagggattgtagaggagaagcgaggtaagataaaggtttaggtggtgacatctccttgtttgaaagttttaatttttgagaaaaatgatttgagaatttttaaaactcatctgaaattcttcaaagcctaaaaattgttgttctaccaatttgagagtttttagaaggaaaaattataattactatcctaccccagtcagtgttaataaaattactatcttactccagtcagtgttaataaaacaccaaaatataaagcactgaatcacaattcaagagcaaaattgtaaaaatatcttattaactcttcatttccctctcttattatatttttaacttccaaataaggaggaaggaacttccctcattttcttccctttcctttccctcccttcccctttaatctctttccttcccttcctctcctaactcccaaacaaagccttaataaacttatgaggtagagccaagggtttacacaagttgctaacgttcttgcgctcagtttgcttatgaagtgtgaggtgaaggagctcatggaagaccctaactattctttttctttttgtgagaggcattgatgtaaggtgaagtataggggagtttctgccactctttcaaccactccatgcattttcttttcaaaccaaaaccccttgtgaaactaaatggaaatgctaaggatccattttttatgtcttctgccttttgttgtagagaagtattcttctgtaactgatgacaagattgtcatcccaaaacaacaatttcaagccaacacaatcatcaggaaggcgaacatatgagaacctttcagggtgatttggaacaaaagaatgctggtaatcatatggtaaaaccaagtcccactttaactggtcaatggtttgtagtggaaggatcctatcacttgtgagcataagcaatttgcacagcctatcccggagttccaactgattttgctgaaggatgttcatttcctcgtgatggagctccaaggcttcaggactcaaactgaaacacagaacaggagagcctccactatcaagaaaagaggactcaataaatatattgggatatcttctgataaaggtggagagtttgaggtcactcggaagactgatttgtccactgtggcgagaaagatggtatattggaaggcagtattcagaagaagaataaatgacggagacaaggatcccagctgccttaagatccctctgaccagcaacaacaacatccaatgtcctatctttcacccatttcaactttatgttcaccaaactaaacttctgctggtaaacatatccttgttgataaccacgaataaaactagaatttcttgcaataccaaaaagccaatggaacttaatataaactgattacagatagcataactaacacaaaaaggtgccctttgcacttgagttatcagaaatccacactttgcttcaagaaatgctctgcatatgtaaaatttggatttatgacaatttaaacaaagtgagaaatattctcctaccactaggaaggcattactcgacacaaaatcagatctaaaactaaagctagaaaccaatatcctgggactacaaataaagcaaaattataacaaatataatcacatgtttatgagctaattatcataataagtatgacctctcaaagacaactatatttcttcacatcacactactacaacccttgaaaaccaaatcaatgaaacaataatacgtacaaattactcaagtcaataatcttatgagatcagcaactgaacctttcaacccagttgcttcagtagaaatggcagaaggctcagtctgctcagataaattagctggtctaggacaaatgcaactgtaacgtcataagaaaatggatttgttccaaccataagcattcccccctaaaaatctctactttatttattctttaagtttacatttttttttatctataagaatcaaatcgaagataatataaagagatttattttaattaaatttacaaaatggtaaagtattcttaagtttaatttatatatatatatatatatatatatatatatatatatatatatataggaatcgaagataatatgaagagatttataacattcatttatcatccttaattgaactaaatcctcttaattacacttacatagtttaacattatttaaattaatattttttctttctttttaataatcaccaaacaaatagcgctcaagacaaatgctaacccatgatttttttattaggatgtatgaaattgtactctttatgatttttttctgcttatctataattttcatattaaaaaaaatttccttttaattttttaagacactagttagcgacaataaaaaaaatatataatcatgtgaccgacaaagtaataaattagtattaactttggcataatttttatttttatatagattgtagtttggtaaaaaaaaaaaaaaatatatatatatatatatatatatatatatatataatgctttgtatatattttctttgcattctaatagcatttcacaatatataaaatactataggtctgtttgagtaagtttctctagaaacacttctagaagaagaaaataaaaagaaaaaataagatgagtttttacataaataaaaataagtttttcattagctaatttttagaagttcaccaatataatttctctaaaagatgagatgatatctacaaattaactaataaaaaatttattttaatttatataaaaactcatttcattttttcttcttttaaaaatattttgagataaagttacatccaaatagaccccatatgtattttcttacaataaatattactttgcatatatattctcacacataataagcacgtgagactatttatttttttgtggttgatctctaatctaatctaatatcatacaaaaattatacttgaacatccaatatatcaatcaacacctaataagagagttaaaagtgggaaaaatatacataaaaaaagagatagagaaagaataagtgtttaattaaaacatatggatactcataaatcatcacttaatattatatatatatatatatatatatatatattatatgtatatgcacattacgtttaggaaaaatgttggattaacatccataatggcatgatattattcaatatctagtgaaagagaaaaaaaatataaatatgatacgatttatgatgtaatacacaagtaaaacaacttttttgaacctatgtagtcttttcgctttgcagtccctgttcaacatggttcaactcttggtcatgaacctgattagtagtaatattactttcactctcagactcctttgccgtgtcataagaagcatgcaacccaacaagagcatagtaaaccaagagcaacaccgtccacaccccaaacctaatatacgagtccacgtcgatagagccaagaaggaaaatgttgatataaatagacaaagcaggcagccacggaaccaaaggcaccccccaaactttgggttttttggccattggaacaccaagccaaagccctccggtccctaaaacccataacggcacacaaatcacgtacccaataatcccatcactgtttgcccaataagccgaaacgccacacgaagacccaaatattagcacaaggcacagaacaaacttcacttgattctcctttgttgttaccccacttgagtaatatcgcctaactagaagcgccacggccacaagcatgaaaataaagagagtggaaatggacaagaggttagagagaacacgaaagtttgtgaagaaagcaaccactgaggttgctgtgagcattgctattgtagcattcaccggcgtcccggtcttgtcatccacgtggccaaaccaaggtggcatcatgtgagtacgtgaaatgtgtgtcaagtaacgagactcaccaactatagtcacaagcaaaacagtggtcattccctttaacgcacccaatgcaacgatgtactttgcccaatcccacccaacagcgttaaaagcaacagaaaacggtgcatccacgtcaatatccttgtaggactgcacaagacatagtgataaagacaataagcaatacaccaacgttgttatcgtcatggacccgacaagtccaatgggaatgtctctagcagggttcttggtttcctctgccattgtcgccaccgcgtcgaagccgaggtaggcaaagaagagaaccgccgaggccttgaagacgccgcgggctccgaagggtgcgaagggagttaggttttgtggattggcgttgattaatccggcgacgatgatgaagacgatgacgaggcagtggaggatggtggcgatgttgttgaagatggaggaggctttggtgctgcacattgcgagggtggctatggcgatgaggaccaccacggctatggggtccaggtggccgtagtcggggttcatgttggggactattatgcggaactcgtctgggtggtggttgcatagggtggcgaagtaggaggtccatgaccgcgatatggcggcgccgcctattacgtactccaggaggatgtttccggcggccatgaaggccacgaagtctcccagttccactcttaagtatgcaaatgacccacctgaaaaacacacaccacaaaaactatcgtatatatatcattgctttcacattcttaagtaaaacagtgattatacattaggcatttattatgatacatatctattaattcttactttttttaaaataattctattcgaatccaatagaattaagtaacagaaaatttcctccaatgatattacttattataggtttctttttctctggtatgtagcgccattttgcttttaattttcaaaaacaaaatcttaagttaaaagttggaagattttatgtagataaaattaaaacttcatctcagtactttaaaaagaccaaaacccccatcaaagaccttgattaagatatctaaatatcaaataatctgtgtcaacgatttttactatttcttaaagtatttttgacattgtgttcttatgaaagttttcatctctataatatataagaaaagaaataatcgatacaccaaaagattaatagaaataatcactatgatcgaatctacaagtctttgtcaatctcccactaacatgtaattactcaactacgtaatttgtggacattgattaggacaatgaagtcctagttgaccatttcacagtatctccgaaaaaacaccaaactgaaagtaagctttgtcttgtcttaataataaagtagggcaaaaacctgcgacgggaatttcgacggcgaattcggtgtagcagaagacggagagcaaggcggacatgccggaaacaacgtaggacaagacgacagctggaccagcagcctcacgagcctcgaggccggtaataacaaatatgccggagccgatgacggcgccgatgccgaaccatatgagatcccacgagttgagcgtcttcttcatctcgttgctgctcctccccttcatctccaccacctccgtctcgtccttggatcgggtcgtaacccgatccttaaacctccacggcgtctccctcaacgcttttccatagttaccccaactcttaaacgattcctccgggaagaaatcgtttttctgaaacgtgcatccccttctccttgcacccctgctcccaccttcttccatttccattctgttcctctctctgtataaatcaaaatatatgcatgcgcgttacgtaattaatggttcagtatataattattaattaatatagtttacgcaggaagtaccaaacaaaacctgaattagcattttgtcttgtctttcttttcttcttatgtcatgacatacatgcatgcatgatgttcttgtacgtgttacttataactaataagctagaatccaagcctaagagagcaatattatagctagatgcacgcatatatatacaacatgtctgaatttctgaatcatgtttgagatatagtatatataattattaatctctgaagatcatatctgagacgtgaaaatcacatgtgaaattaatgtagaaataaacacgctaatacacacacgcacaaggtgtcttcttctcaatgcttacatattctcaaaaagcaaatatatatagagaggaaactactaagcaaaatagtacttacagacaattatggaggggaacatgcaaaatctaattaatggaatgaattaaggaagtgaaagtggagaaaaaagcgatcatctggtgcgtgagagaaagaaagcgtttcaagagtagagggggtgcacctggtggagaccctgaggggttgcgctttaatttatatatgcaataaatagcagtatataacaattcatgatgaatgtgtgtgcctaaattagtaattaacaagaaaagcctcgcactactttagggtcatatattattgtatttttaacagtacggggtatacaacttgatttactataaattaatatgtccaggttccttattaatttaatttgacgtatatattgttcttttgttttgtttttatggaaaatttggtccattttgatgtgtacccctctagttgaaaaatttagaatgtatttctttagagtatatttgaacgaagtattttaaaattttaggaaatttaaaattaagggaaattaaaatacatcaattaaaatttttttattttcaaaattttgtatttggataaagaaattgaatttcttcatttttaaaattttgaacctcattcacggaaaaacacttaaggtgaatgttgtcttgagagcagtggaggtcgaagtatgtctatgattgagacgaagcaaaaagttgtgcatttagaacttctaaaaaagaacagaatttcaatttctcaccttttagagggaaattcaaattccacaaatttaattgtttaaaattctcttttaaaatttcaaaaatttaaatttctcatataaaaatattcaaacagtgaattttaaattgaagaattttaaatcccctaataaattactttccccaattaaaattctccatccaaacacattcttaatgaaatgccgttggatgggtaactagattgagctacctctccagtctatgtttctgctgaatgcaatatatataacaaaaaccagaagcgaaaaactcattagttttatattcaggtgtaacaaaatttaattatgttttcttgttctatttttatagtgtatgtcacgttgtcattaatgttggatggcatcaacgatctataactgatctaataactgaaaaaaaaacttgttgaaaaatatagaatcaaaacgatcgagttaattaagagaaattgataaaatgcttgtacttgattggatgagaaaagttgtgatacaaactccattatggtatagcttacataaaagaaagccagtaacacaccataactaaatcaataatgttaatttcacctagggtgtgaaatatgagtgaaaagaaagggaaggtagaaaaaaaacagataaaagaaagagagaaaattaacgtgagagatacggttgagaaagaagagagaggggatgaaaaataaatgtaagagaaacagaatgtgaagaaaaaataaaattaagatgctaatcaaatatatatatatatatatatatatatatatcagcaaatgttaataaaatatctatgaatactctaacctgttataatttaatcttttctttatttgtaggaataaaaaataagaattatgagatttataataactcactttttattagtttataacttttaatttttatttattaactaaaaaatttatttgatttattgataaataagatttctttagtagtttttttagtaatttttatgtttttaaaattttacttgaagtattaatttttaaatattagtctttaattttttatatttttcttttttatctttaatatgtttatcaaatttttttattataccttttaaataaattattattttattacttttttttcattttacattttataaatatgttaccgttaattttactaaacacttataatttaataagttaactttttaattaattttatcaaatataatcaaaatcaatataagcatcagaatctcactttccttgaaaatcaagtatagctaaaaatatttttctattaccttcaaataaacataaaaatatacattttgatcttcgtatttacaaaaaaaatttataaaattccgtgaatacctcctataaaactaaacaagtcatgtaatttatatgtgtcttctcctttctttatcccatttgtcgaactcaactctattatttatacttgaagacaataattaattttttctatatgtataaagatattgataaaatatatattattttttaaatgatttattttctattcatctaactttaattatcaacaacaaaagttacttagctacaccttagtgtaaactaagagaatctctatgtcggctcaggtgaaggatattatagtttaaactaaatttttaaatttattattataaggtcaaatgtggaagtataagaacttttttttcatcctttgactactgtctccttgatgtctccacatgattctcttttcgtttccgactctgacttttttcactaaactatcacccacttacttcattccgtcaacatttgtttttttgttaattttttagacagctttgttttttgttaattatttcataacaagggctaagcacattattacaaaaaaaaatatatatattaccggaaaataagggggctaagcacatcgcatgtgtataaattgtgcacatggagatgtcatttatagaataaataaatagataatatttttaccaacaaatcattattcgagtgatcatgaattttattttttatctaagttttcgaaattaagcaaatgaaaaaatgtgtttcaaaatagagattttattaaaatttattagttagattctttgataaaaattaattattatcaaaattaataaatattttatgccaatatcataataaaaatatatagacaattttatctattcctaaaatggtgggaacatgtcatggcagctaaaagtgaatacaataatgcgaaataaagtccttaatacagcagcagtattttttttgtttttccaaacatcgtacctatttctctccctgattattttccatgtcccgttcctgcaataatttaaattcgattttttaatgcgtgcaaccttacacacgagtaattaattactcaattttatctaattaattcaaattatattattatatttagtcaatgattttggaattgtataccatgcaaattaagcatttttagtgatagatctcaaattggaatcttagaccattttttggtaaacctcatagtaccatgtaggattgaagatatctcaagatccctcctattttgttctttaatggtagattttattttgagatcttagggagagagaaagaggaaaaaaatttattcttttttgaacaatatgcagatcttaaaggttcttctataagaacccattctccatgttggagatctctctacctcctttattagaagatctagtgaagaccagatcttgagctcaagatccttacttaaaatcttgcactaaaattactataagtctcctctataaataaatatccattattctcctcatgactcttcttactttggatccataataaccacttttcagttttcagttcggaagtgagaggagcaaaacataagaaacggtggtggagatgaaggcacggagcagccacgagatgaagatgctgaactggtgggacctcatgtggttcgtaatcggcgctgtcataggttccggcatattcgtcctcaccggcctcgaggcaaggacggtggtcggacccgccgtcgtgctctcctacgtcgtttccagcgtctccgccttgttctcggtgttctgctacctagttcgccgtggaaattcccgtcgcaggttcggtctcttgcactcttgcttttttacctattgacctaattgcggtcgcgattacatgagaaaatacagctgataggattttaattacgattgcgttgttgtgagttaaaatactttgacattacggccacaattgtgagtgcgaaatgccatttgaaatcatacctatttgcagtgttttaagaaccggatcaaccgattcgataggtttgactggaaacagtttggcacactagttcgatttgctaagaagatgggaaatgtattttcagatgcttcatatgtgatttctggctcaaaggtagaaggatgatcaacttgtacgtgttggaagggattctacttctattagagaacattctgaatctgaaatctggtagtaagtcttcacagatgtttcttctagttcccataaccttgcatgatgatctcaacctcgcacgaatcccacaaattctagtggaatctggaatcaaacactttttgtttttggcagaaggagtgccctcccaccaagagtctgactgaacatcatcaaacacagaccaataatatgtgcaaattagaaaaacaaacatagttgtcataatatatgtccaaatatacagatcacatattcagtttgaagcaaaggttggagcccaaaatagagaaacctctatgtgttgtgtgtgtgtgtgaaacacatcaaacgagttatgattatgattaaatatgtgcaaattagaaaaacaaacatagttgtcataatatatgtccaaatatacagatcacatgttcagtttgaagcaaaggttggagcccaaactagagaaacctctatgtgttgtgtgtgtgtgtgtgtgtgaaacacatcaaacgagttatgattatgattatattccaagttcacttttttagctattgtttccacaaaataatgcttcatttttcattctaagtagaaaaaaaatcatatatttgctgcatcatttggaaacaagttacatacctgctggttgtttgatgagtaagagtgatcagaagaatccatatcactcacttgttgtagttgtaaactgcggacctcaaagcaaatgtttaaactgcgaaatgtaactttcagtctgaacaacatatatccaccgttgtgggaaagaaatattgtccgttagatttatgagttttctgtatccaccgtctgggattttttcttcttctccttttctcaaagtttccaaatttatccctccatctccctcaaccccgtgacaacactgcccctgtatctcctccttttctctctcttcctcaacaacactgttatggctgctacaactacaataaaatcaaaaagcgaacaaagtaaaaaccacacatcaaaatcagcccacaccaaagaatcagtagattcttttaagcaccaaagaaatattattaatatgggacaatcgtacgtgtacaagcatagcccctattgcatttcccagcaagtttcctaacaacagcatatggaatatgccccaaaaatacagcacggcgccattgaatacatccccaccccgaaaacataatataccaattagtggctactctttttcttaattgaaagaatcaacagatgaaatcacttaagtgtgtaataatacagcactttttatattattttttttatcactacgacaataatgtcgagtatccactaatttttatttaactaatttttacccgaaaattttaactaatcacttttagtgaatttttcatctcaaccatatttttttattcacaaaactcaaatccattaatacttatttgtattatcattacatacttaagtgatgctaataaataactaatgtaattattaattaaatgtttgtaataaaattaatttcaatctctcacgaatatggtaattcattgatctattactaggttataacattgttattgtaaatagaattttttaaaaattaactttaaatttgaaaaacatcctttaacaatgacaataataacaagtattgttgatgatattttataaacattacattcattttcaaggagatatttttttaatataatttaatacttctaataaaatgcttattagtatttcattcagtatctttaattttagaaaaataaagtcaatataaaattaatgctcactataactcaaaattgtttcatattaatatttattattttttaattttccatcttttaaaaaattaattgttgggattcagataaaaaagacaaaagtgatttcatattctaaagtttgttcaaattagctctcaataagagaactaaccactgtctttttcatcaaaatggtctgtttccatagatcatattatttttttaatgaagttttagctctatattcatgtcaatgccattttttttaaaataaattttcttatatttttttaaataagtgataaggcttattaaatactctttaacgatatatatttttagattccaaaatgttactaatgaattaattataaataatatattaaaagtactcacctaataatttaagttaaaattaattttctatatataaagaaatcttaaaggcagctacgtcaatgaggcaggtgcctggtaccttaacattttccttattatctcgtataatatccaattttgaaattgttttttccttcaaatctggtactctgctgatttacttctttcatgttcatgattagaaagcacccatttatcttttgtctaaactatacatttggagagcaaaataaaaactatacacttgcttagactttgatatctaatagtttttgttagggtgatatctaacattgttgaactatagtaagtaaaggtataattaactgtactttgatatatagttttttttttttttatatatataaaaaaactgtactttgatatctaaactatacatttggagtacattttcggaagatctgttttctgtttaatgggtccttgagccaatttcagtttgttacttgaaatctgagcctaaattgggagcataaaagtgctacttgagcatcatctcatgaaaaaaatccatttttgaataatcaatatcttaaatataaaaattcttagttaaggtaatgatatccaacactttttagcactcaagtttttttaacagataaacgaatgaaaagtttttccatccttcccccccaagaaaaaaaatcaaataaacgctttaggctaaaatgtgaacaaaaaaaatatttaactgaaaaatatcataactatggtttaaaccgttactaacaaggctataattaggttttctttttttacagaaggctacaattagttaattaagcagagttaacgaaatttgatggttttgttttaaaccaagctttaggaaaaatttagtgatgtaaaaaaatgagaaattataagagggtaaaatgtaattaatcctaaaaaataatttaacttaacaaacagtagatttttattttatgtaataacgggggcaaagagccacaaagttatcttagatattcaaccacacaagcaacgatgtgtttgatacacaattccaatgaaaactcacgatgtgtgaaataacattaacgtgattctaccaaaagatttctccattttattttatttctattttcaggtaattaaaaaaacatttttaagaaagaaatgctggccaacaggtagcatttgagcacaagtaattgcaaatgttcattattttcctggaaatgtttttcaacattatttgtttacctaagtcaaatgagaatttgtataaatcaaatttctaaagcagcctgggtcttgtccaaattttcaaatgactggtaaaaatctatgatatcagtcatttttatcaagcaatgcttgcacaagatcatcaaatattacaacatatgtaactaacagatcaccaagaaaagcacaagcttcacaagtcatgaaagaaatagtagcatttactagtctaggacttgtaagtcaacatataatcagaatgaaccaattgctttgggtatggctagcaaggaaacaacaaagtaggctctggcaatcacacaaaacaggttttatgcccttttcacggcttgtccgcctcatatacattcatacatacgtgcatgatatttgtccagctcttatattggaaaaatatcgatttcaattcaacaattgcaggctgcaatatcatatatattcatatacacaaacaatatcttcctgtgacagcaactgtggtaaggcgtcatggcatgaactgtaccttttatatgtgaggacgttatttcttatctgttgtaacgccaacaacaacattgctcacctgtaacatgtcaaatttattttaaggaaaacttgctatgctcaggggaatcatatatgaagaaagaaaatacaagtccaaaataaaaatgaaaagcaataacaattaccaatttcccacttgaatcaacagacattggattttctaccactactgtttgactttgagattggggcattgactgcaggtagtgaaatagaataatataatcagaacagaaaaccgctaatacatccttactatgaataatcacaaaaaataaaaattaaaataaaagcatactgttgaagtagtaggtagtgttccagcattggttgtcccattgggtctatggacagggatcggaagccttccattgtttgtctacaagacaggaaaggggagcaaaagcaagtaaacagtataaaaatcaactcagaaaaattaaacataccaaatagatacattcatattcacaaaaaatagaagttgagaatgacaatctcataatttcttttatcagcaaatgttagttgttagtatttgttagaattttagtggagggatacaagcatacaacctctcccccctccccctcttctcccttcaaccttaaacccccttcccaaccaccaagtcaaccttataactcctgacaatctcataattatatattcagtatatcataacctttacagatgcatctaatgttaaaggacatcctagtaagttagtcaagaggtagggcatataagtgggttttgacaaattataggctccaatcttttaggctggatcccaatctctattagccagcatgagattactcaagtggtcatgcttgtaaagaataaacaggacacagaaggtaataagactaataccagaatagctaataaaaatataaattatctatatataaaagcctttcctattagaaaacacaggttatataattacctacacacaacatacactgacccataacaaatttttagcctaaatattcaatgctcagataacatagttctatcaataaaaacttacactgacattagtaataaagtgacaaagagcacatttgactgagggagctccataaggatacatgagtgttgtccggcagttcccacaatggacatgagctacttgattagatgctttataatgcagatacaaagcccagcaacggatagtcaggaaacaattaattgaataataagcataggttattaaatataacaaggatttcatcattagatgggcatgagtataagaaaacagaaccaattaaagcaacactgcataaggatcccaacatcttgtagttaatatgcaattcaaaattaacattggaattggaatattccaaaaaatgacaatgaaaaatgattatgaaagtatattcttttatcaaagaaataaaactcaatgacagattaacaagtagctggctataaattataacaactgtttgccatttatactaactcttatgtttttatatctttgtgattaagattgttcttctccagagtccagactgtaagcaaaagcaatagggcaaggacaaatgttaagaatcaacattttcattgattgatcatgaaggaagaattgatgaatgtggctgctgctgctgcttttttttgggagggggggattctgacacaaacctatattctatgtgatttgctggaaaatgaattcacaaaaagataaggttccaaaatttacaaatcatacagtaccacagaatcacagatagataagttccaagggaaaccaccataaccattttgccactagagtaatgttcttagaaactaaaccaccaagactaagacctcattcttttctagccttacaacaaactggcaaataaccagatgaccatattacaatctccaaccgcatgtgaaaggaatctcacataattttttcaacttatcttccaccctataggaatttgaacaaagagggataatagatgaggaagactgaatcgaggttatgtggtcatgagtcatgacctccctcaaaaagggaaaccttctttctaatgaaaggtcaagttggtagcaatctttttaagtagcaagccagatgcatcccaaagaatacacaggaaataaatgaataaataaataaaaggatcaccttaatgcaccccttgctgaccccttcaccaggatttggtaacaccattcacattaaccatatattcaataaccaagtaatccaacaaaacatcaccacaattataaaatagaagatttatattaacaagcaaattaacatacagtccaccaaaatcaatgctaaaccactaaggtaacatactaacatgtagtggtttttttaacaagaacatactaacattcagtacctggtggaacaaggtttacagtgtgacagcacgaacatctcacacttgtagctccacgtgtgtacattagcaatgtcctacaacctccacaataaagttgagacatttccatccctgcaggttattattatggtagagttcctcagaataagcatcaaaatggagtctgactacatgtaaatattaaatccagaaggcaacatgatttgtttcaaattgaataaatggcacataccaaatagataaagacgggagacacaccaatataaaatgagtgagtttacctaatcttaaaatttgcaaaaacagaaacaaccaatgagcttaccaggtggaggaacagaggtaattgtgttgcacaatgcacaacaaacattggttgcccctcttgggtaaagcagaaggctcctacaaccattgcacacaacttggctctgcatagctgcaaagttaaagaccattcaccaggaaactcaaccaaaatgaaacgctaagactcacacgcaaatgaatcaataaccaattgaaccaaaattcccactaatttgttttacagaggaaaccagacaccagaatgcctgatccaagtcaaaaacacgtagcacctgctccgcagacaaatatgaccaaccccaacattcgagagtcaatatgttcaatataatatgctccaaaaccaaaaccagacacatatgttccataaccaaacaaaacacacccaaaacagaaaatcaaaacaaataagataatggaaataacaaaggatctggcaatacctgtggctcccgaccctgctgcaacaaccgagtcaaataacaacaagaagaagaaaaataaaaacaaacaaaaaaaatcttagttgtttttgtttcggcgaaaacgaggatgtcaaagggggaaaacagaaaagattgagagaggaatgaagaaatctgtaatgaggattgagattagattctctttagagaaatgaagaagaaaacaaattcaaccctctctctctctctcttcaattacttctaccaatgtttcctcatcatcttctcatcgcacacacactttcggaaatttcttcagcgactattagtctacgtttcttttttctttttttttaatcaaaataaaagtataaaacattggtcccttttacttattcttttatcatggtaaaataaatatcagataaaaattaagagcatcttcacttccttaaataaattatttatcttaaattttatgatgtcattaaatttataaattttatacaatttttttttttagcgaggaggagcaaagcccaaaaaagaaactccaaatataaaggacagatcatagaaatcctagataattacacaaaaaattacttgaatattaaagttgataaagtaattatttaacttaaatcatgttaaattttataattgaaaaatgttcttttaattgttaaaaatgaattaaataataattatttatataagtaacgtattgtcaaatcatatacttagtaaaaatttgttaagcatagttgtttaattttaagaaaacatcaattttaaaaatatccttaaataatacaatattaagtttaaggatatttaattttaaacaactcatgaataaagtgtgttagacatgctttgatactgtaaaagtgaattcactattatgaatttttaaattatttaaaatagattaatttcatcaataacttattattttcaatgtaataattttttttttacaaattgtaataattataattatacttacaaaagttatgtgaagtataagataaaaataatattatgttacaatttaaattaataaagttatgttatggataaatttacgaaactgttttttatatttcaatttcaacatgctttatctgtgaatgatatatacgatacatacggaaatgacaatagcatattgtcaaaacaaataaaaggacataatccatacataaatcaaataagggaaaagaaaaagaaaaggaaaggaatagtagcaaatgttaaaagaataattagttacaaatgtttagtaaaagtgtaaaacttcaaataaaaataagacaggtgtttagtaaaaaggttttactaaaataaatattaccgattttaatttttatcatgatttgaaagcacttttccataattttaaatattaattatttattattttttcaatatgtatcttaataatattcatgaaatatagaaaattaaggtgtattttttatgagaaactcttagatagatatataagtctaacacatgattcttaaacacaactaataagaattttataactaatagaataaataaataaatcagaatgccaagtaaaattaaatctgatattttttctgttttttataatcgtcttcctatttttttctaaattgtattgaaattaaaatatatacaagattataataagaattcagaaaatataatttaaatgtcaaaataatatgatttggtggtgtaaaattgtagagaatttaattttaaataataaatttattaaataaataaaaaaaacacgttggctttaagcaatagtgaaactttgttgatgttgggtttataattttaatttttagaatacaattttaattaggatttataaatatttctgtaatattaatattcagtatattaaaaaagaaagatatattcagtttggtacaacatatcatatcaaaagttaaaaattaaaatcaaactataattataatagttaataatttttaaaataaaatttataaataaaaagttgaaattaagaaataaaatcctcaatatgaagtcgcatatttttcaaggcacgactttttgtttataatttttctttttaaaaaattattaattaattataattataaataaaatgaagcttcactccactttcttgaaactgctgcatctcatgcacttcataaaattaaatttctttaaaaagtttgaattacctttaacatgaatattatatattaaaaaataattttagagaaattttttatttcaatttttgtcattataattcatttattcaagttatctatttgcttttacaatttgaattataatttgaaatgtgtattcttttataatataatttgtgtaggtgattagactttttcttatcataaaaaataaatattactaatttactttataaaatattttgacatatttttatattcaaaattttattataaagaacaaaaattttgtaggttttattttcttatttaagaagtttcactcataatctgtatcagactgtatgtttgatttggaaaaaaaaaaaaaagaaagaagattaggaaaaaaaactgaaataatatcaaatttatttttatttgacattctgaattttttttattaattttaaattttttattaatttagtataaaatgatatgttaagtttgtgtctatctaacatgctctcatttttttattttaaataattaccttaaagatgtaaattgaaaatcataaaatatattttacttgttcctaacgcttacgcaaaatgtcccatgacagcaatccaaagtcaccattatttttagccttatcacaactcacaaaaatcttgtttattatagaatactattcaaaaatttattttcccaaactgttcaaaattagcagactggtctaaaaaaatcaaataaatctttaaaatcgtttgttgaaaaaaaatgaacaacattcagttcaattttttttaatgttcaaaatagaaataaattaaacaaaaccataaatatagtaaacttgcattagtttcttaaaataaacttgaaattgttttaacttgtaatttgtaatttatatcaagttatggtttgtgatgaaacttagtatctgaacaagatttttatatttactatatattttattttttatttaataagtatttttccttaaatgaaaaattaaataatagaggaatttatatgccggttcaaaattctaatcttatgaactttcatttgtttattgattaaaaataacgagttgtccattaaaaaatatataatttatttaataaaaattataaatgattatatttgattaattaaatttgacttttctttgcgtataggtttttctaaaatgatcaaatggaataaattaacttcaaaatcaatctaagccaagccgtaaaccgcgttgaatttgttgatatactgatgacggagataataaattattaataataaaatttgttcaaaataaagggtgtgtttttttatacgacgagtaatctattggagatgtagtatttgtttaaaattatctttcgttgtcaatagggttgtgtttaaaaataatgttctgaaaatgtgtgtaaaaatttgaaaagttatatttacagtatttttttttttatcgtgcttatggtgggtggttcgtatgtaaagtataaacagccataataagagagaaataatgggtaaaattattatttaaggaactgttttattcacggtatttttttattcatttatggaacttattacatatttaattaatatattgatctagtaataaaataaatataattaattttatttgtattaagcattctgcttcttggtgtaaatttaataagttttagggaaatatctctaaatttagcgtagataaaaaaacatttaaatataaaaataatacttacattgttgagagaatgagagagagagagagagagattgcaaatttgcaagtgcatcaaattgagataaagttcaaatcacaaaataaaacacaccgtgatttcaaaaacaaaaacaaaaataaaaaatactactacaacacaccattaaaattgtttatcttagcctcaaataaattgacttgctctgttgctcatttagagaagccggtataataattaataacattcactccacgcacatcttcatttattcaatgtcaaagttaatataaagtttgaacctgtaacaatatgtcaatttattcatgttacatgctcatcgattattaaacttttaacattattgctataattgttgttgttatgaaacataactttattttttatttttaataatatagaattaaaattttggagttgcagctactcacatatttctcaccaattagcaacaactgaatttagttggtccgacaaccttaagaattcagagacagaacccacacttggcttcttagacttaacaaatgatatggttgatcaattttgctttatcttatattaacccatccttctccttaggccatctgcattatctccgaccattttctcactacggtaatcaactggcaaatacttgcacaatggcctcagaaaatggagacaaactagagcttgctttcagtgctgttcctgatcccaagcccatgaaggattgggtcattttgtcccttagggtggtcgcattttttgccacagcatctgctacacttgttatggcattcaacaaacaaaccaaaggcatggtagttgctaccattggcaccaacccagtaacaattactcttactgcaatgtttcagcacactccagcttttatgttagttctacaaatcatatggtttaattttcctttgttttcgtttacactttttttaacattgcaatattatagtactatattagctagacatgttgaccttcttatgtgttatttatggtgaggcagattcttcgtgatagtcaatgcaattgctagtttctataacttgctggtgataggagtggagatattaggaccccaatatgattacgaaggacttcgtcttggactgattgcaatattagacgtggtactgaatggatcctactttttttttagtcaccttcacttttacacatttttttatattcaagttaagaatttaattagaatttacaataatatatataaaatataaaaatctttacatagttctctaatcatatataaagtcatcccaagggattccttgagtagagtaagacaggccttatatttgaattctcatttgtcttgttagaatgagataaagataagtttttgtaaatattttttgagtccagaggttttctgtgaaacaccatctccttcttgcttccgctaaaatttctcaaccaaaaaaaataatcacatataaagtcaatttcggacctaatctagagaggtaatggcccgtggcccaagacaggaaacagattaattttcctgaaaaaaaaaaagttcatcagttgaaattgaataataggcttttttatattattttcataaatagattaaaatttaccactttcattctttttaaagtcaaattaaaatgtggcatgtttatttggaagtatcacccacttaattattttttatgaaatgaatttataaatcatttttagtaaaattatatgtttatattttcttatgaatacacgtatgtaagggggttttatttattgttttacttcagatccataaaatgtcaaaatcaactcttataatagattgtcatataaataaaattgttgattttcataataattattttaaaaatcatatttaaagtgatttctaattatttgataatttacaaattgttatactaacattttatcaaaattaaattattaaattaacaaatatatatgaaaactatttgactatatatccttttgggtgaagatgacgatggctctagcagcaactggagatggtgcagcaacattcatggcagaattaggaaggaatggtaattcacatgcaaggtgggataagatatgtgacaaattcgaagcatactgcaaccgaggtggtgttgccctcgttgcctctttcgttggtctcattctccttctcgttgttacagtgatgtccatcaccaagctgctcaagctaaatcacatttagcaccttcatgcttacaattaatgcatgatacatattgatatcctgctttctatattcacctgtttaagtgcaatccagtgtgtgatatatgtgtatttagttgtgtcataggaccacaaataaatacgttgattacatggacttttataaaaatttcttagtttttgtgtaaaatatgttggtggcatgaatctcctctttgtcttttttgccaactgtcttgctccccactctcaactgcattggctgttctgaaattaagttaatgtgttttgtttgtccattataattcccaacagtaatatataaattagccaaagtatctctacaagtgtgggattatatcttaataaattagccaaatactaaaaagaaaggaaattaactgacatggaaattatgagatgcatgtctcgattgagagaaacaaaattaataaatgtgattcttagtgatctaggacttataataaccaaaattatgataataactagtaaaagaataacaaaataatactaatattactattattaataataacaataacaattctaatacttagtctatcataaaaaaacaattctaatacttagtaataacaaagattattatagttattttaagatagagtaagaagattacagtgtaataagatgggattctccataaatttcaaaggagaatatgattagaataatttaattatgagaaagcatttccataaaagttaataaagagatgagaataaaattataaatctcaaattataaaaggagagagtgaaagtaagatttgaagcaatgagatgtggtaaattacctatatcttgctgtaattaatttttttattgtttatttttttaattattgccctcaattctcgatcgattagtaacaaattaatgtatttaatggatataacatagttcacaacgtgttaagttttaagtttgtaaagaaagatctaaattcaatttttatataatacatcatttatgatagacgatgaattttaaatataactaaatctagaaccgaagattaattttataatcaacttaaagggtcgaagtttgtgaagatatctagcttggaatcctacaaggaagacgaagattatattttaattttatttgtttattgacaaatattaattattaatactgataatttttattggcaaaagattcgaacttgcaacttatatcccttcatttttcccttcattactatatcaaccttatatctcacttaaagacctaatcacagtggtaaaaaaaaactaattaatataacttgatgaatttgttcatactcatactcatgtgcatgacaattaatctttctgttaaaagttttattttaaaaacaatctttatgttaaaattaagacagttgaatgattacatctactaaataagaattattgataattattgtaataagtattttttattgatgtgctagtttattagcttttgtcagtgaaaaagatttaaatttaagatgttttttttttcttcttcattcttcagctattaaatcaatcttataacttaataattattgtaatattagaaattgagattaagaaaaaacaaaatttctttgtaattttttttaatggatatcaactctaacaaaagtgcctataattatatcattattgctggacttagggtccaaagtagctacaccctttgatgaggcgccaatcttgtagttgagggcagggagatcttgagagcgtttatacacatctcacatgtggatgagtcgttgtcgactctaggttatgattaaggcagtaacatttttgatgaatcactacaatttatccattatcggtgtagtgtactatcacatacccaacacctactacaaaacacactagggtttctaatattcacgtgctcggttaaatcagttaaactaaattttttggtaaaaactttgtcgcttcaatttaattataaataaataaaaattgaacatttaatattaataatatatactagcattatattacgacaaacaattacccttagtcacagtgtcacgcaccctgctacctgtcttatttttcttctttccaccatatcacttctattgatacctcaattatatttttcttttttcaattttcacacgcattaattatttatatatttatataatatttttacttttttatttactttcttttaaatctttccatcatattacatcacataatttattataattttcggtgtatatagaaataagttattaaaataaaacatataaaaatacagattaaattaggaaaatcttagaatccttacaaatgtgtatatatatgtgtgtgattaattttaaattaaatcccaatttaaataaaatcattaatgatcatttattaaattttttatttatatttttctttctcctttttcttatactaaagcacaaaaatattctcattatttactttttcacaaattacattggtgtgggactttcatagggtcacgtggcaatgcatctgtgagttgatactttgccacttcattttttatgtaatttttttgagataaattacattttcctttaattaatgactatattttcagttatgtcaattttttcattaattttttttataatttgtcaaaaatacccataaattgataattggacaaacctacccttctttgggtttataaaagttctggggggtcaagaaaagaagaaaaacaagtactgctctcaaatttaaaaaaattcatcagaggttattttcttctcactttagcttaaaaaaaattaaactcttaaaacatttcacgtcgcacatatttgattgtgttaagcaaaatctgtcacaatattgctgtgattacgatcatctttttgtgatttttttttttcattttatgactacatttaaaatttattaaagttgattttctgccatgaagtaaatcttcgtatccaaaaaagatttataagtgaagataacattactgttaaaagagatctgcaaggtcaaggtatgataccttcgtactaatttaagaattgaattcatctttcttttttcttaaaaatatttatcttacgccattttattgttgatcttgaattgcttcaaagtaaaaaggtgaaaaacttcttgaaacttgatattatgttgttgattctttatttcttttggatataactgtcaaatgatagacatgcttgtgaggtttgggaggacattcccaaatctcttatagggtaataaacatgtataattatttatgtaaaatttctctttacctcttttcagttatattgcatgtactttaaatttatttttgtgtgaaaaattgaaatttttattatataattgattgttcgttcataaatatattattaaaggatgaatataatgggataaagataaaacgtcaatttataagtcaagaaaagacattaaaaatgtcatattttattcttattgttgtcgtatgtctagacataagattttcaaattaaaaaataggcacatgaaatttcatcaattaattttatttatttatttatttacaataccattgtttatatatttatttgtgcaatgaaaagggaaatttggcatcaaatatcaatgaattttaaactagatcgaacttatgagaatgatagatatgaaaaagcatagtctttccaattgattgtagattgaagcaagagcaattgaggtaattcaaatgtagaattcaacactttcgatgccaattaatgtgaattcaaaattgaccttatttattaatagtttttagattctacgacacaccactacttcatgtggtctgtggtgcaccattgttaatagtctttagattaatacctttggtgctcgttggtctccatttggttccttctttgaccatttcctatgggggatatagttggtttcctcgacgaggttctaggagttaaggttgatgttgatggtgctgcgaagcatgagattaatggagggtccgccaaaggtgacaaagagggaaggagagggagaagaagcagaaaatagaagaaaaaaaaagtggcaattctgtcccgaaattgcctttgaaggtgacgcacaacgaagagtagtggtaccaagaagaaggattaaggatcagatgtggaaaatccatgataaaaagttgcactataaattaatctaaaagctattaacaatgatggtgcatcatagaccatataaaacaaaaatgtattatattatctgttaaaaaaaagtccaatacaatattttgagaggaaagggaaatacaagcatgaggaagggacattaacccatttaatagagggtgagagaaaatgtatatatattttttttttggaaaaataaaaggaagttttgaaaaagttaaaagaaaagaattttggaaaagcgagaatgctaaataaaaaatgaaaaaggtaaaaacaattatactttgtaattaaaaaagtaaataaaattggagttataagattgactttaattaagagagaaggaacataaaaaaagattgtgagttctattccttcttattaacaaaaaaaatcaacatattagataatgacatcgactttaaaaaaaggataagtaacattgtcaaagaaaattgtacgttaaaagactttctattttctttatctttttatgtcatagattaaaaatatattaatctgtaagggacatattaaattcattttagataatcgtttttttttattgaatttagataatcgttttgaatatatttttacgtgttgattgtactttcttaaaaaaaaaaaaatacttttcatatattttatttttaacatatttggatgtgatggttatacaaacatggttatatctgccgaagcaaatgacaaatgttgcaaacgccagtttgttgtggaatgtggaggagtaggaaagccaacgtgtaaaccaaacgagacttaagaaagcaagccaagaaaatgtgccattcattttgtggttcgttgggttgtttcatcactttcagttaatattgcgcgcactacacaccttcaccttttaaattgacattcacttagattatttgatacaatttagactacgatgaattttatcataaataaatctactaacaaccttttaaatatttgaggaattttatcaacaataaatccactaacaaatttttaaatattttttattagatgatatgctgagttgacccattcttagaaattagatataaattattcatagaaattattaaatacatcttttaacaataaatatattataagatcttttaatgtcattggatctgtttcttaattcaatttgaaaatttattccttttttctgttccaattcgaagagttattaataccaattctatcacatttattattatgctattaataatttttatatactctcataataataagtcaggtaaaaaaataataaaaatgaagttatgaaaacgtgtaatgatatttttgtgagttattatgattaattttaatttatatattattattgatgatggtcgatactaaaggtaacataaaaaaaaatgttattaagacttaaataagtgataagacaacgcaataaactcattgctggtatgaaatcgtttatcttcattttacaaaacattatcttagaagtagataatagttaagttattaaaatttataaaacgacaacaaattttattggagcaaaagtgttcaagtacaattgcacgtctttcagtgtagaatcttagccgcttcccgctgccacagcagttcactttcttttctgtccccttattttttcaaagatattaaaagatttgtttttctttttcagaataacttttataattagttttaatattaatattattgtcgcttattcggtacaaaaaatttattatcattattaatggaattaaaatctttttgtagtgtagcgtaactgtacaagtagtgttgttggggtttcacctgggacttcgtatccattccattattttcaatcactatttatttaattttgtttcccattacacctgtcaaaatatatttacatggtttttatgtcccactctattcttttgtttctatttttatcgttattaaaaggtcctctgctgctatttgattttgggcattagaatttagaatccaagatttgtagatttttgattcttttgcaatttcacaacaaattttggggtttgctacattcatgcattggtacatacttagatacaataaataaaataaaatatatatacatgcaattcaatttgcatttgggttttcgtttgatttgtgaaggaattttcgtggttaattcttttgtacgcaactgctgtgtttttccttcagaacgtggaaacaacttttcgggaagaattttgctgcattgagtacgtttgtgttctgcatttgttttgttgtagttttttttagcagttttaaggtttgtttggggtcagttagttgggtaatagatagataagtgggaaactgttttgtggaatgtctctttggctaattgggactctgataaggttagttacaatggtctctgttcttgttgcaggctcaataacttattcaattgggtttatctttcattttgcattgaatgaaacagttgaaattggctgcagaatctcacgccgaagaggttggttctttcttttttctcattttgtgatttaaattttaaaccttgacaatgtggtacgtgttctagagcgcttttcatccatgtgctgctactctgttcaaattttccatcctctgttattatggatcatcacaaatttcagatcttttctttgtttatggaatttgaaaactgttgttatttttgtgtatctcttccttccttcattgctttctttctttttagtcttttctcattatgtttaagacattgtgattgtgttttcgcttgtgtaatatttgatattactagtttagttcctgtgctaatttctgctcctcagaaggatgatgttaatttactcaggaattgtaaacccttaattttttttactgtaggctggtctttacatgttatgtgacttttcgttttttggggtttggaaagattggaaatttctcaccctggtggtggtggctggtttgtttagctttccggaatgttttattatgtctggcattggatcgcctaatcttttgatggttcctgttttgtattgaattgcatttacattatttggtttcaagagcattgcatgcatttgaactttgaaaatactaatctaatgctctctgagtctatcttattaaagcttaaaatatgaggatgtttttttgagctataaaaatgtgattcacttaaatttagttaatctttttgtaaccgtttgaagtgtatttattcaactatgatgtaagcaacctgaatgatgccaaagtacgaaaaccgttttggttttacatttgataccgatttctttttttttttttaatacaagattgcatcctgttgtctttgaattctgagagctatctccaaccttgcatcaatgatgagtcaatactgctagttgaggcttcaatcaaacttaaatctgtctcatggcatacactgcttataccttaccagcataagcaaatgaagggcatcaatgttgtataacttgttttagaagattagatggcagtaactgcatgattgagtcgctgttctgcctttacctgaaactccataaattttacatgatttctagctggtgtagcaacataaatgcttgaaattaatctgttacagtgtttgaataaatcctttggaaaggacattttgtgttagacgttgctagactttgatgtttctcccaatcattttttatcagagtcaacaaatttagcattcatacatgtgatattttgcaggataatcctcttaggcataaaccagaaatggaaaacacacttgagtcttctggcagtccacgacatagaaaggtatttagcatgatctactgtgctgtgaatttgtcttccaatagagtttggatattttttatggtgaataaatatcagtttggatattcaatagaaaaaaatgatttaaaaattactatgcatatatgttgttgtcatggtgacttgttgatgtcttggtgacttgttaatcatgggttcgaatccggaaacagcctctttgcatatgcaaggataaggctgcgtacaatatccctctcccttatctgcgtatagcgtggagcctccgggcaatgggatacgtagtttttatttttttatatgttgttgtcatgttgcagatatcagccagatgggatccggttgaagcatgccggcctatagttgatgaagcacctctgttttatccaactattgaggtacttataattatcactatcatagtattatagtttttggtggtggttatattgtattttgaattaaatttttgtttatactcttatcaggagtttgaagacacacttggttacatagctaagattcgcccccaagctgaaccttatggcatatgtaggattgtccctccagcttgctgggtaccaccttgccctcttcaggagaaagatttatgggaaaatgcaaaatttcccactcgtattcagcaaattgacttgcttcagaacagggaacccatgagaaagaaaattaggggaaggaaacgaaaacgtagaaagcagtcaaagatgggcatggatacgagaactgccaaatcaggttctgaagctaatgttgcttctgagcctgaggagaagtttggattccaatcagggtcggacttcacacttaaagactttcagcaatatgccaatgtttttaaagattgctactttggattgaatgatgccaatgaatatggaaaagttagtgatagtagtcaccagcagagatggaaaccctctgtggaggaaattgaaggtgaatactggcgaataatagagcaaccaactgatgaggttgaggtactaattgcggttcattgataatatcattagtcttactgtcacataattaagcaaaaaaattatatattattctgttatttttgaaggtgtattatggagctgacttggaaactggatcacttggaagtggttttcctaagacatcatccttaactaagaatgagtcagatagatatgccctgtctggctggaatctgaataacttcccgcgactgccaggttctgccttatgttttgaaggaagtgatatctcaggagttgtagttccatggctgtatgttggaatgtgcttttcctcattttgctgggtaagtagtgagaattacattttctttcagtctaaatctatgcaagaaacaaagtttaaggcataactgatgatattactgattttctttttaatcactttctgtatctgtctgtggagttatagagtttaagttatttttcatgaaagctgagttgaaatttttaaaatctgtctgttttataaaaaaaatataatttcattaaaggttcagcggagaaaataaaggactagaactagtgtaagacatagactagaatccagatagggatccctacaaactgcataattattgaatcatgtatagtataatagaattctcggtatgcttacactcaacatttttggttccactgctttatgttgatttgtttgaaatattgagctataaaacaagtaatattgtcttcaattttgcattgcttttgtttcagatcttcatactttccaataaaaactaacacctttttcttgtttctttctccttggaacagcatgttgaggaccatcacctctattcacttaattatctgcactggggtgacccaaaagtatggtatggagtacctggaagccatgctccaggtctggaagatgcaatgagaaagcacttgcctgatttatttgaagaacaaccaaatctactcaatgaattggtatactactcagaattgtactttcctcctaaatttcagttttttggttgccttcattctgtttcaatatagaaatttcataaacaaacagagattgtagttgatgctaaatgtgtattttgttggaagtttgctaggaaattttaatgccacctgtgaaagttaagaaactaaaactatgatgacattttgaaatctttagacttcagagtgtcacttcatgtgtgtttagttaaaggcgtgatgcatttgattagtttagtgtatgatacttttatttataaaattatatatatatatatatatatatatatatatatatagcggaagctagagttattaggtaatcaatttatgagtaaggtagagacccccccctcccccccccctctggtttattctccctgtgctggaaatgaaaaactattcttgaccctccacttgagaaaagtttttaggatatccatgacatagtatttgagccactatgaacaagtggtcaagattatgatcctaactattttcactaggtatgatggacttatgcactatccacacttcaagccttagcttcccttgtgtgagccatcttgtagatataaaattgttattatgtttccacttaataacttaagcttctagaagagttaatccttggccttcccaagaatcaaagttcactagttcagtatagaatctacctggtaagctcctattgagtttgggataaagtgttgattaggagtaagtatcatctaaacaacttaatggttcctgtagacaaatgtcctgcggtgatgtatactgtacgacacataagttcctgtagacaaatgtcctgtggtaagtgtattggtcatatcatttagaattagagtcaacacgggttcaaatcacgggtttgatatgtttccaatcatcttaatgtttgagggtgaaccttctcttcgagggacaaaatgatatgtccaaaaggttgtgagggtcaggtttgaccttgtggcttttgcctaataatggcttaaagccttaaatagggaatggtttgcgtttaatgtaggatgctatatgtcaaaagtttcacctttgctaatagatcaagcttttggcatgatggtaaacgctcttggtcatatcacctgcatttgtcaagttacccttagttctttacaagtccattaaagattttaaaattatggtatagttatctgttttatgacctttctctcgttatgtagtatgctgaactttgacaattctgtttctaccaaagcgaccctatcttatctctccagaactctctagcacatctgttcatctctcatacaagtcttggatattttagttctctttgtgtagtagatagagtttgggaactgtattatgattctagtggttatgatttcatctttgagcaggtgactcagttatctccatcaattcttaaatctgagggggttcctgtacatcacactgttcagcattcaggggaatttgttgttacctttccaagggcataccactgtggcttcaattgtggcttcaactgtgcagaggctgtgaatgtggctcctgttgattggcttgtgcatggccagaatgctgccgagctttacagtttgcagtgccgtaagacttcattgtctcatgacaagttattatttggatgtgctcaggaagccgtgcatgcccttgaagagctaactcttcatggaaaagaaaatctaaaatatataaaatggagaagtgcttgtgggaaagatggagttcttaccaaggcagttaaggtaatgattcttgcatactctttatctttgatcataacccactccacatatttataaagctttataacactttggttggcatttattatttaattttagttcccatggagatacctgttcttcatttcattattttttttttccacattttgttacccttatttttgacagacaaggataactatggaaaaggaaaggcttgactgtcttccaactcatttaaagatgctgaagatggacagtaaatttgatttgtttgaggaaagagaatgcttctcttgcttctatgacttgcacctatctgctgtaggttgcaagtgctctcctgactgttattcttgtctcaaacactcaaatttgttttgctcatgtgaaatggacaacagatttattctgtttcgttatactatgaatgaactaagtacattggttgaagcattagagggagaatcgcatgctattgaagtgtggtcaaatagaaactctggaatggtttctgctaatgctgaggatgcttgcatttacaaacaagatgtggagagcaccatttgccaaacccagagttacaaagaagggaaaaactcaacttgtacaggaactaatgataagtcaaattcaactatacctagtagttcttacagccacatttcagcagaattagtccactcatttcaccatgaaacttttagtgcaccatatggcactaaagactgtcataaagacaatttgaatgaaaaagatttggtcatggacgataaagttacggtggagaaaggaggttctgtggatttgaatattgatgttatgtctggtgaacctgaaaattattttctgcatgctgctgattaccatcataataagggtgttccatatgtggaaaaagtcagctttgcagaggccagaaatgaaccagacaacatggaacctggggctgattgtattgctggcaaagaattttcatcttgttcaagggatgttcaaaattcttgtacacttgatggttataaattgtttggggtggatctgcagatgcattctgattcaggagagcaactcaacagtgtatctaaaatgggtgacgttgaaacctccaatacaagtatattgttgacaaaccaaagcttcttaatgcagaagtttggtatttctgttgagcctgtaaatttgggctctgttatttgtggaaagctgtggtgcagtaagcatgcaatatatccaaaaggtaagctgcagtgtaggatcttttctgggcttgtaatatgcctttaattttttttgtgggagtttaacatttcatttgttttggtaaatttatgaaggattcaagagtcgtgttaagttctttagcattcttgatccaccaagaatttgtaactatgtttctgaagtctatgatgctggatttcttgggcctattttcaaggtattattcctgatgtttctgtttcatgttaaaatcatatcgactactttctgcttgtagatatatgaacctatttaataatataaataggagttaaggtgtacagggaaattcacttactcatttacaaaaatcaagggtatctctccgcaatcctttttttctctcttgaggggcagtaggcttgtaattttttgatcaagtctgctgttggctaaactgctaaaatatggtgcatttgtcttaaagacaatgctaaacattttcagagaagactttttttcttggatatttttttggagaaactcagctgctgctaattttccattgaatagaaaagtttatgctgagtttctgtatgaaaattcatggaatctgacaatcttctaacataatataatggaactaagtgataattgatttcttgttattctattttaaatggtatttgcatggacatttttcagttggaagtatatttctttctcattcagtaaaatatatttcaggttaccatggaagaacatccaaatgaggctttcacaaacacctcagcagataggtgctgggaatcagttcttgacagactaaatcatgaaatcaagaggcaaaggagtcaaggtgaaatagaacttcctcccttggaacttctgcaaagcattaacggtcacgaaatgtttggattcctttcaccatccgttattcaggtaatgcaaactcatgaatgtttaagctattcacacccttgttttgctaaaattaatatcactggtgtattcttttctaatatagatttatagtcataaagtttggaattcggatcttatctttagccagttttcttgaactagtttaatgtagcttatcatgttttgacttatgatgttttaatcaattctgaaaaaaatttccaggccattgaagctgaggatcccaatcatcaatgcatcgagtactggaatcacaaagaagttgtctctgaatcctcaggcagtgccattgatgactgtaagttcagtcatggttcaagcaactccctaggtgatgtcaagactaagctttttgatgcctgtttgataaagcaggagcaagatagcatcataggaagttgtgattcttttgaagagatgaaattggtgctacaaggattcttgaaaaaggcaagttctgatgaattaagtgccatgcataagttattcagctctgatgcacagttcactaagtggagagcggcatttgtatctctgatagaggaaatccagaaagcttgtgcataaagtgtaacatctcagctctatctgactttagataagtcgtatttcattttagttcttagtgaggtcctttctttcagtgaccaattgaactgaagatgatgctgggtgaaaggccagataaaattttgctacttgctcggtgtcaataacttagagatggataatgacatggaccaattgtaggtgctaatgccattgacccattccaactttccttttgagtttacatttacttctgatggcctggcctgcagctttgatagtattttagtacatgtttcatccttagtgatcttcatactctccaattatgtatataaatagaaaaacaaatgttactgctataaatgatgacaagagtaggaacaatacatggagagttaaatttggaataagttccttcttggtcagaatattgaatatctgatcttttttattgatagacattgaatatctgattttagtttgaagcaaacagcattcataaatctccacatgctgttttctgatttgtaggaaagttagctctgtgtggctcctgtataactaataatcctctaagcataaactaatttgggttcaacccctgactacatgtcaccaagtcccttataggactgcttgatttgggggattaaatactagtcaggttattaaccaaaaaaagaaagtttgaactctttcctaatcaataatcatgttccattacgtcaagttatcctaatttaatgagatcatactaaagtagcaattgcctatcaatatctcaatgacagtcataattaccataatttttcagtatattatgctgaagtagtaattattgatcaatctctcaatgatattgtcaaaagccatagtcatattaagagagagagttaaactcactatgattttaggaagcaacaaatagttgcatttgtactaaactcaccatgatttcttaccaccaaaccaaatacactgagtagtacgctcaagcctcaagagaagggctattgcatcctacagctatgattgcattccagaaaatccattttgcatttcagaatgagctttccggaatgcaatgggaggtacaggatgcaataatgggagtgcaggaaacaaatgcccaagagaaggggtggagatgggaaacaaggaaggaacgttaattggaccagatcgatggacaggggagtgaggaaattttgggccagagtcacgggttgggcggacagatcattagtaatctggatttgtggaaatgaagaaatagcttaaattttacattagaaataaaagagtattgaataaagtgaacactggaaaaaaaaaattaaaatagatccgacggatgattctgaggtgcctcaaatgagaggaaaattctagataatgtgatccttagcgataattggactaagatgaagaaagggatgtttggataaactttttcaaacttatttttataaaaagaaaataaaaaaaattgaatttattcataaactaaaattaacttatgcatgaatttaaaatcatctttttagataaattaatataagaaaacttctacgaattaatttattaaattattattttttattttcttctcataaaagtgtttatacaaaaatttatccaacacataacacataaataaacaaagaaaatacttatataaatactaacaccaaatattataacattacaataaaatgtatttctaattacttgagaagaaaaattaagtggaatagactgtaaaacgagataattcatatttgatttaaaactaattagtaataatgaagatttgttataaaatttaataaaaatgagaataaaactatcaactctaaatttaagagtgagtgaaaatttgtttaaaaaaagagagtgaaagtaaagaagaacgagagaattttatggcaatgatcgagataagtgtagaagcttgacagagtttctccccagtactttgatgtagaaactctcaaccacttaaatttcgtaaaatatatatcttagtagatatgatcagttttaagaaacttataatattgtatttaaatccctactttttatgatgtaagttagaaaaaaaattacatttatattttcaaagataggacggatgtcacataatctttatctgctattattaatattacacttgcgtctcgtttatttaggtctaggtttttatctttttatgcatagttaggactcggctaattcaccaattttgcttttttttttttttttaatgtcgtttgactattacaaatgtactcaggtacttgacattgtcaagggtttttgtttgagaaatagtaagtaagttgctataaattatttgatattattttttgttttttttaaattacttttgacatttttagattagattttataaatattttataatgaaaaaaaaggaaattaactacttacagattttgatttggaggtccaaaaagtttgaagaaaagaatagaatcctgaaatttcggaacttcatgggattgatacaaaattgcaattggaacagaatctcacacccaaaagcctttcttctggtattggggacacatgcacaaagtcatcatttgaaatagaaaagaaagccataccataccataccaaactgcttgtagtagtagctagaatcgggatctttcgccattcgaagaagcacttcaacagatattttaaaagattgttcctaaagtgcggagaaagatggaatgataccatggcctatcactttgaccaatgttaccgaaaaagccagtgagtttatttttaagtaaataaataaaactatatatatatatattaaaattaataacttatgagcatgatatattagactaagagaagacacatccatttgctagactagaaaaaattatcatcttttgtgaaaatttatagtaaaatttacctattgcttatcaacagaaacatttttaatactcgaactcatcaagttacaactaacatgagtacaagacttgatgagatttaatgtagattagttcttagtttctaactgggatactctagttaaaaaaagaaaatgatcaatgtaatgggaggagataagaaagtaatcttataaaaaaaatatgtaaataatataattgtcttaaaataatcttttattttatcagtcttatcaacaacttttttagtaaaccatattttattagtttacttcgcagtggtcattgcacctcaactatattttattcacaaccaaaaagtttcatataaaacaaaactttatcaaaatatggcagtcttgcttcttggtctcaaatagccaccaaagagtaaaaaattgaggcatgcgtggatctcataatgataactaatcagcaaagcaatttttttttttttttttccaaaacatgcatttttaacttagaatgctatgagataacactttttgcaccgggtggaggtgcactatcactatgacatgtgcgcaaaggcacttgcacttgaaatgccaccgaaccattatgtatccactttctttggggcacagccaaaaagcagtgccttaaatatttgtaatgttaggttgaaggctacacgtacatgccccactgaaaccttccctttataaatgttatctagatttaggtttagtataggaacattcaatattccataagtcagtatgcaatggatatctcagtataatctacgtacactaaattttatgagaaaaagttatataatgtaaatttttttaaaacatttatttaattacaactcatttcattatgtatgtataataaattcattaatttttaaagtaattattttaaaataatttaaacaatttatgatttaatgataatataaaattatttatatattttcagtacataaatattaaactaaattttatttacatttcttttgtgtcttctgaatacatttttttattgaatgaaattaaatatgtgaaatccattttttatttaatagatttcatttgaaaattagttaaactcataaatttcaacaattaaagagaggatgtatgttaaggcttattgttgaataaataattcatgtatgtattactatgctactatactatactactactccacactgtcacagcacccgagatagtttaagattctccatacatacttgacctgttaattccgaaccaacctgctttaatatcattgttgagttggctccactttccacttccacttcaggcttcagaacaagctgcaaaaccagacacagtttttcagtatttactcaactttcataaatactattaaaggtcaacaagtcttacagttgaagatggactttactacgtgctgctgaactgaacaatagttgtcatcactcttgttcatgcttggtggggctttggctttgcattccaaaacccaaacggaaaacatgcattggtcacagcatacacatttagtggtactgtttttcttgggaatggttctgataccttccgtgtgtcaaagtgatgcaactacagctgtgtacattgttactctgagacaagctcctgcttctcactatcatcatcatgagttgatcacagtgggcaagaactctagacatggttcatctgggagaagaactagagttcacaaaccaaggtacccccccatatttgttttcaatgttaacaaactgtgttcaaagtgtattaattgttacattccttttatagctgagggtgaggcttcttgttgaagttatgtatttgtgttatgatgataagatgaacatttgtttaaatgattgtcatagtatctacacaactcgtgtacaagttgtttgaaaaccttatcattatagtatttgtttgatactctaaattcctgtactttgtaccatatttttagtctccaattttttgacttttgtgcttaattgtgcattcatttgagagatatgaatggtcttttttttttttttcagacatcagaatgttacaaagccagttatgaaacgtggttcgtactttgcccgagttcacgactcgttattgaatagagtgtttaatggggagaaatatctgaagctctatagctatcattacttgattaatggattcgctgtgctggttacccaacgacaggtatggaatggttttacttttcaacatcttgattgtgtccttattctgtgaagaaatatgtgcttcgttgtttgagttgtttccatttgtgcatattttggtttttgtatttgtgatctggtaaacttcttcaaccaacatgttcttgatttttgaaatcttgaaggcagaaaaactttcaaggagaagagaagtgtccaatgtggttttggatttttctgtgagaattgcaaccacacacactccacaatttttgggtctgccacagggagcttggttgcaagcaggtgggtttgaaactgctggagaaggaatcactattgggtttgttgacactggcattgatcctacacaccctagttttgcagatgataaatctgaacatccattccccgttcctgctcatttctctggcgtctgtgaggttacgccagattttccggccagttcttgcaataggaaacttgttggggctagacattttgcagcttctgctataaccagaggaatatttaactcatcccaggactatgcttctccctttgatggtgatggccacggcacgtgagtgtttcgtgtttccaaatgagtcttgtgttcaaatgttgttaaccacaattggacatctggtccattctcctcctctttttgtccatatcaacaaatctgtctttctataattttatctttttgaagtttatttccctctgcttgaactttgatgaatcatttctatctagcttctgtttatcagaattttgaactcatcaattagttctccccctgttttgtttagctttaatagtttagaaagaaaatatattgaaaaatggtctggaattgctactcgccgatatggatttagccaatgcttgaaagttaaaaatgaacttacatattcatgccagactatcaatcatgtttctttcattcaaaagttcaaaatatgataggtatttgaattaagtgtgccacaaaactaaaacttcattttacttgttttttcactgaatgtccattctgatatatctttaacaggcacacagcttctgttgcagccggaaaccatggaattccagtggtcgttgctgggcaattttttggaaatgctagtgggatggctcctcattcacagtaactaatcttgaactttatacaagttaaaaactcatgtgtcattttggaaaataattgaagatgagatgaaatggaccaatagacttaaaagggagaaaaaagaagagaaagttgatatctagtgatagaaagatgtaatttatctcagaaacgcttaatgccttttgctttgcagagaagtgctcaactaggtgctaaagctgagtatctatattcttaaagagggttccttccttgcattgagcttcaagataacataggctagtatatcaatgcagttaaaatattagacctctagatatttattaccttgcaagggtatgtggttctatgtattaagtcagtggtctgtgcatctagaagatttttccaagtcatatttacgagattgattaattatcaaaagctcaggatgctttagaccatttaagccccgaaatgagacttgcaatatgattttcagaagtaagggggaaatatttcctgtctctcaaaattacaagattttctacaagaaaaactgaaagaaaactccttcaatggttgggccaggttcagaaccaaaataggtagctgtcctaggagatggaccactccattgtccctgtgtacattacctgccattcataattaaattttccacatattctgtcatatgctctactttattttctgccttggtctctatcacttatctctttttctcccctgtggaatgcttcaattccatagaattgatctccatgtacagtaaccgacaatttatgtaaatttatttggcacttgaaaaagattatagaaaattatattaacggtgtatgtaattctttttattcaagaacaaaatgaagagtggatctgttctaacctggatttctaataattacatgcaagcataattaatttttattctatatatgtaacatttgaatgcattccatttcaatattttacagcattgccatttacaaggcactatacaagagatttggaggatttgcagcagatgttgttgcagctattgaccaggtgtctgtacttttgtatgccatttatgtgtcagtaatatttgataattttactttaggtcatttgttgacacttgatatattttcttgtttttatcatcttaatgttatctcttcctttctctagtactcgccaatatgattgcttgattaactacataattattgttatccatttttcaacagcctgtttattggcttcaaataattctgattcagtgaagagcatgtaatatagattgtattaggattctaaatttaacctgtgggttgatccaatataatttacttttcatttaaagtttgttaatgtatttattcattcatttatttaaattttcattgagggtatgcatggtcttgaattgaagagttactgtaaagtgtaaaaagtactttccttgcatgtgttcctttcaaaatctgtttacttaattgtatccccaattttacatttatggtatggcttatagtataatcaattgtttacaggcaggtcaggatggggttgacataatatgcttgtcaatcactcctaataggcgtccttcgggcatcgcaactttcttcaatccaatagatatggcattgctatcagctgtgaaagctggtatttttgtagtgcaagctgctggcaatactggaccatcacctatgagcatgtcctccttcagtccatggatctttactgttggtgccacctctcatgatcgagtttatagcaactccctatgtcttggaaatagtgtgaccatatccggtgttggactagcacgtaaaattctgttgctctaatcctggttagctatacatgaatttgtttaagacaaacttggccttttggccttggtgggcatttggtcttgaaattaacaaagaagtgcagatgggaaagtaattacttggatggggtaaatctggtgtgagtgagtgatttcaaaaagtgatgtcatactttatatatgaatccctaccaagaacaaagaaattcaagatttaaaatggacactacactactgaaacaactactttttgttacctttaagaccttaatcatgttacattggggaagttccttgatgaacaataaaatgatttaattattaatttgtgcaagtataatttgttacatcagtacgcctattgagatttttattaataccctaattttttttcatttttgtttaattactttccccagctggaacatatgagaacacgatgtttaaactgattcatgcaagacatgctttgaacaaaaacacaacagttactgatgatatgtatattggtgagtgtcaagatgcaagtaagttcagtcaggatttagtccagggaaacctcctgatctgtagctattcagtccgatttgtggttgggctctccaccattcaacaggcattagaaacagccatgaaccttagtgcagttggtgttgttttctccatggacccttttgtgtctgcttttcagcttaacccagttccaatgaaaatggctggcataataattccatctgcaaatgattccaaggtgcattgttcattttctcccttgcacatgtatactgtcttttttcttattttttttcgcttgtattttattatatgggtgctgttggtactgttcttcaatcagaattggagtttcacctgctaaataatcctttaatgcaaacattcaattatgcaaattactgaggtgaaactccaattctaattggagaatagtgcaagcaacaccgaatatctgcatgaaaaaccatggtgtggatttgacatttgtcaacagtcaacttatttctattccttgcttacatgtgtgtgggaatgacactgagaccaactattcactttgcttttttaactgtgcagatattactgcaatactacaattcttcactgcaaatagatggggattcaaaaaaaattgttaaatttggggctgttgctagcattggtggtggattagaagccaactacaataatgaggccccaaaggttgtgtattactctgccaggggaccagatccagaggacagtcttcctcatgaagctgatattatgaaacccaacttggtagctcctggaaattttatatgggctgcttggagttctgttgccactgattctgttgaatttctaggtttgtcaatacataagcttatttttactagaaaacaaaacataaacaagtttaaggtgtttatttggcctgttccaagttaaacataacatctttttaagttataaatatttatactaggaaataggaattttgatttattaagcatgtcaatatactgatatgtgaatatctgatctacactattctaacaggtgagagttttgcaatgatgtctggcacaagcatggctgcacctcatgttgctggtcttgctgcactaattaagcaaacgtttcccaattttagtcctgcagccattggatctgcactttccactacaggttctctgtatgacaacaatgggaggccaataatggctcagcgatcatacccctccatagaccaaaacctatctccagcaactccctttgacatgggaagtggttttgtgaatgctactgcagcattaaatccgggattgctttttgattctagtaagtctcacttgactaatgaactttcaaatcattataatttccatgcaagttcaaatgtttcaaaaattcagcaacgattgttgttcaaatgtctcacttatctagctcaaatttatgaaagctgctggattaataaacaagcctgttttctgaatttccaaatgtgtttatacatattttctttgtaggctatgatgactacatgtcattcctatgtggtatcaatggttcaactcctacagtgctaaactacaccggtcaaaattgctggacttataattcaacactatatggccctgatctgaacttgccctcaatcataatagcaaggttgaaccaatctagagtggtacaaagaacaatccaaaacattgctggaaatgaaacatacaatgttggttggagtgctccatatggcacgtctatgaaggtgtctcctaatcacttctctcttgcaagtggggggagactagtcttgtctgtgatcttcaatgcaaccagcaacagttctgctgctagctatgggagaattgggctgtatggtaatcaaggtcatgttgtcaacattcctgtggcagtcatttttaaaatcttataaccagctaattaatatgattagtgtctttaattacttcttcagtaattcattttttattttgctttgttttcttaatctagtctttgtttaaaaaatgtattaagctattttttcattcgttatacttaatagtgtaaagttacgtttgtataataccaaattgtgcagcacttattaggtagtatagtctgtggctcaaaaaaaaaaaaaaggtcgtatagtctggttgcatacgtgaggtgggttatttttgtccggtatgcacttggaggacacccagcccaagttgttaacaaggacactacaagcgattagtgataattgtgaattctcatatgctttgttgagtaactgttgttccatctttatttacctttaaattttagggatcatgcacttctagacgtttttttttttttttttttttaccaaagtgaacctttagagctagtaactcacttttgagagtaaaataaataactcatttattatgcataaccaattataaatgtgttggatattttttgatggaccaaaatttcttacttgatcctttagaggaatttaaaaatctaaacttttagttggttaagattaatgatatgctttaaattaaataaaagtaaacatatctaatttagaaataagctcattttcactgtgttatattgctgtgataatcactttgatcactatgataaactataagttggaaacacagcaaattttaattggaaatttttgtttttttcataaattatagagtttgattagaagtattatagtataaatatttgttatacggttatcaatctttacattgaaaatacatcaaaataaattttaaattatattagtattttaaaatataacttttgagggaatggcccttcataaactcgtctgacagattatgcaaacaaataatttaaaaacaaaaatcaaggaggtgtgaggttatcatatgaaaaagttgaaatgcagcagtagcatgtgtaaggaatagatcatacttatcgcgacacaaatacaaatataaagcagcctgtacagccacctagtgaggaaatgtatttgtcacagtacaaaattcgctcaaaatctgtatcaagcgaaccaataacataattaacaaacctccgtaacttttattatatatgttgtaagcgcagcaattgttgaacgcgcagtacatgcaccgaaagcagcagcaaatgttgaaatttgcttcaacaaatcacgcgcagtaccttttggcatattaggcaccgaaaagtgcacagtaacaaatgttactgtgcacacgcgttttgcaatctatataaagcgctttgcattcggtttaacgcagtgaagcagcgcaaaacaagagtagaagaagagagaaatatttaggagtgtgtgagagtaaacaccaagtgaggaaaaatatcaaaatactcacttctgtattttttcttttgtacccaattttgtgtgatatccttgtgaggattattgggtgtatttgggatttgggttttgagtgttattttcctcttttgtactcttcttcattctagtggaactcttgatctgtcttcgcccgtggacgtaggcacactgtcgaaccacgttaaatatctgtgtcttgtctttgtttcattttactccccattttatttttctccatctcatattttgctttatccgatccaattttcgtaacaaactggtatcagagcatatcggttggatatttgagtggaagtactgttcgtcactattcatactattcacgtatacggcactattcacagaaaaatagtgtgatccggagcagttactatttggagtatcgtcaacaccatggcggcaaaatttgagattgagaagtttgatggcaaaattagttttagcctatggagagttaaaatgcgtgctattttggtccaacaaggactacaaaaagcacttttgccaagagaaaaattgtcagctgatgatgatgctgcaactgcaagcacaacaactgcaacaaaattagtgtccgctgcggagttgacagatgttgatgagaaggctcgcagtacaattattctcaacctctcagacaaggtgttatgcgaagtggtggaagaagacactgcacttggtgtgtggcagaagcttgaaagcctctatgccacaaaatctctcaccaacaggttgtacctcaaacaaagtctttacacacttcgaatgaaagaaggtacgcctattaaggaacatgttgatgaatttaatcgggtaatcatggatcttagaaatgttgatgttaaaattgatgatgaagatcaagcccttattttattatgttcgttacccccttcatatgagcattttgttactactttgctctatggtaaagactccattagcatggaagatgttaaggcatccttaatttctcaagaattgagaaaaaaggtttctggcaataacaccgatgaaattggtgacggtcttattgcgagggggaggagtcaaaataagggaccagtaaatagaggccgatcaaaatctagaccaaagaaaaatattgaatgttactattgtcacaagaaagggcacattaagtgggattgtcctaaactgaagaaaaataataaaaaggacaataacaatgaaagttcttctgttgttgctggagttgtggaggaaaattcctcagatgataatgttcttacagtcactgtttctgattctagctcagaaaatgagtgggttcttgattcgggttgttcctatcacatgtgtccccataaagattggttcaccacttacagatcaataaatggtggaactgtcttaatgggaaataatatgacttgcaaaactattggaataggtacaattcaaattaagatgtttgacggtgttgtgagaactttgacagatgttcggcatgttccagagttgaagaagaacttgatctctttaggtactcttgactcaattggctgtaagttttctgctgaaggtggaacgttaagagttgtcaaaggtgctctaattgtgatgaaaggaaaaagaagaagtggtctttattttttgcagggtaatacagtttatggctctgcttcggtgtcctcaacagtagatcctgattctgacactacccttttgtggcatatgcgcttgggacatatgagcgagagaggattgatcgaattgagcaaacgcggtttgctttgtggccagaaaacaggtaaaattgacttttgtgaaaactgtgtttttggcaagcataaaagggttaaattcggtactggtgtgcataataccaaaggaactctagattacattcattctgatctatggggtccttcacaagttccatctctcagtggtgcaaggtatttactgactttcattgatgattattcccgtaaagtctggatttataccttgaagaataaaaatgatgtgttccagaaattcaaggaatggaaggctatgatagaaaaacagttcggtaaaaaggtgaaacgtttacggactgataacggtttagaattctgttcaggagaatttaatgagttttgcaggaaagaaggcatcgtaagacaccgtacggtcaagggtactccacaacaaaatggagttgcagaacgcatgaacagaactcttttggagagagcacgttgtatgctctttactgcaggtctgccaaagaagttttgggctgaagcagtcaatactgctagttatttggtgaacaggtctccatcgactgctattgaatgtaagacacctgaggaactatggtcaggtaaacctgctgattattcttgtttaagaatatttggttgtccagcttatgctcatgttagtgaaggcaaattaaagcctagagccaagaagtgcatctttcttggatatggacagggggtgaaaggatacaggttgtggtgtcctgatcctaagtcacccaagtttctaatcagcagggatgtcactttcaatgaatcttttatgcttcatcagaaaaaggattcatttgatacagatgcaaattgtagtgaaagtgacaaacatcaggtggagttacattttgatgcttcggaaacgatgcccgaagcaattacaaatcagcccacagaagaggaggtgcaacatgaggaagcaccaccactgcaacaggacactattgctgctcggagacaacgcaggcagatcaagcccccccagaggtatgcttatgcagatctagttgcttatgctttgactatggcagaatcttttgaagaagatgagccttccaattaccgtgatgccattacaagcaaagaatctgctaaatggactgttgctatgaccgaagagattgagtctcttcacaagaatcagacatgggagctagtcaaaccgccaaagggccaaaagattattggttgcaaatgggtcttcaaaagaaaagaaggaattcccagagttgaagatgctaggtacaaggcgcgcttggtggcaaaaggctacagtcaaagagaaggtgtggacttcaatgaagttttttcaccagtggtaaaacatacttcaattcgtgttttacttgcattagttgccttgtataatttggagcttgaacagctcgatgttaaaactgcttttcttcatggtgagcttgaagagcaaatttacatgcatcaacctgaaggttttgttgaacagggaaaagaagatcatgtttgtttgttgaataaatcactgtatgggttaaagcaatccccacgacagtggtataagcggtttgattcctttatgattgaacatggttattctagaagtaactatgacagctgtgtgtatattaggaagctctctgatggttcatttttgtatctgttattatatgtggatgatatgttaattgctgctaacaacatgtcagaaatttctaagttgaaatctcagctcaactcagagtttgagatgaaggacttaggtgcagctcgaaaaattttgggcatggaaattcatcgagaccgcaaagcaggcaagctgtacttatctcaaaagaagtatattgagaaagtacttgagcggttcgggatggaaagttccaagccagtctgtacaccacttgctacgcattttcgcctatcagcgaagttgtcaccacagaccaacgaggagaaggaacacatgtcacgtattccttatgctagtgcagttggaagccttatgtatgccatgatttgcactcgccctgatatttcacatgctgttagtgttgtcagcagatatatggaaaacccaggcaaggaacactggcaagcagtgaaatggatacttcgatatttgcggggtacttcagatgttggtctggtcttcgatcgtagcaatattaacacttctgaaagtgttgttggttttgtggactcagattatgctggagatttggacaagaggcgatctttgacaggttatattttcactctctcaggatgtgccgttagctggaaagcaactttgcagtcaaccgttgctctttcaactactgaggcagaatatatggcgctaactaaggcagtgaaagaagccatttggcttcgaggtttggtcactgatttgggcttagaacaaagttcatcagttgtctattgtgatagccagagcgttatacatttgaccaaaaatcaaatgtatcatgaacggaccaaacatattgatgtcagatatcactttatcagaaatattatatctgatggatctgtcaaggttgagaagattgccacaacagataatccagcagacatgatgacaaagcccatcacgacaatcaagttcaatcattgctcgaacttggttggcgttcgtaaaatataatcctttattaggatttcttggagaagactgtatcagaaattttattgaagtggagttcagctcattgctttatccccatatctgctggagggggagatttgttgtaagcgcagcaattgttgaacgcgcagtacatgcaccgaaagcagcagcaaatgttgaaatttgcttcaacaaatcacgcgcagtaccttttggcatattaggcaccgaaaagtgcacagtaacaaatgttactgtgcacacgcgttttgcaatctatataaagcgctttgcattcggtttaacgcagtgaagcagcgcaaaacaagagtagaagaagagagaaatatttaggagtgtgtgagagtaaacaccaagtgaggaaaaatatcaaaatactcacttctgtattttttcttttgtacccaattttgtgtgatatccttgtgaggattattgggtgtatttgggatttgggttttgagtgttattttcctcttttgtactcttcttcattctagtggaactcttgatctgtcttcgcccgtggacgtaggcacactgtcgaaccacgttaaatatctgtgtcttgtctttgtttcattttactccccattttatttttctccatctcatattttgctttatccgatccaattttcgtaacaatatatttatatgcatcaaaatcccaccacagcacacaaaacttgttaaaataaaaagataagaatgaaagatttttcaaggttgttcaaattaaggtcattggcaatgaatgtcaacgacatggacccttcaaggtgaatgctcgtatgctatgtccttgtccttgaagacttgcatgatttgtattgatttttgggcaatgaatgaagaaatacatgctcgggtcaataataaatggttcaacaattcaattcctaaaacatatatgaacctcttagccaaattaaatagtacattaaaggagcatatcgaaacgagtttgtttataaacgcaagacgcatatagacccgagagtttgtgccatttcaaacctggcactcgagataaaataaagattaattagttgctaacttgtggtgctggcatgaaactagtatccaacatctttggaagcagcttaattaaaagcatacaccatttactcaatatattaaaaaagaacattttctattcagattttgttcatcaaacaagtggtgttcaactaaattcagcactcacatagccaaacgtatgtactaacccaacactaacatattcagaaagccttatcacatgttttaataattttttccttaagcattcatagaagaacaaaataaacttaaaattttaaaattaatttatacataattcaaaaataaacttttagagaagttaatttgagagagatattttaaattaacttgtgcataagcttaggatctatttgaggtgattgtgagtttttggttatcaaatataattttgaaaataaaactcatttgataaaaataaagttgaaatgattttgattcatttttaaaatcaagatttttttttatcaattttgtttttaatttaaaaaacactcactttctatatttgacatagcttttttgatgtttctaccactatagtcactattatctccatcacctttatcaatattagtactatacaatatcattattgttattaatgtaatcatagtcatcgcaacaaaaaacactattaaattaattttaataaaataaaaaacttttaaaaaataagtatattttgaaactaaaaataaaataaaaaacataaatttaaaaactaaaatcttgtttttttaaaaaaaaataaaataaactcaactaaaaatcacctcaaaacgggttagactttgaacaagtttattatatttttttcttttcctaaatattagtaaaaaagtttatttgaatagacccacaaaaatatattatattgaaattattttaaatttcctaatataatttttattattaattatttgtcttttatatatgaaaagcatataaaataattaagaattaagtaaaaataagagcataattaaatggtactatttaatattatcttgaataattaaatagttcagtaaaaataagttgtttttcaaattggacaaataagaaaaaagtaaatattttagacgcgcactgtgataaatatgagtccaaattttattattccctgaagacttattcaaatgcattaatgtgaattaatttaatgcattgaagacttgaattctacttccggtggaaatcattcaacacaagaaaactacaggaagtgggttttctgctgcggtatcaaaatgtttggccttgatatgacatttagtgttcgattgcaacgtactatctcgtaaggaccaagtaaaaatagaaatctttctattaaagtatatgtaatagaagatctcaatttttagattttaattactttttttttagattttatagtattatattacttttaaaatattttttattttttatttaatttcaataatatatcatattttaagatttttaaataattaaatacaaatcaatttatgaaaaaaaagagtaaaaaattattttttttaaaatagatgcaaatcatattttacaataattaaatctccacataaaaattcataaattttaacaagattaaaatttgaaactaaggtctgtttacaaatcctttcattgcgacacatgtcatgatgtcaatatatcaatacataagttgctgttgctggtgtgccattttcatttttctgtcaaaatgcatatttgaccttatggcattggtgttcaattgcaagttgcaacgtatctcctaggtaaggtaaagtgaaatgaatttttttttatccataaatattaataattaataaaaaaaattataatcaaccacctatcccttctttcatccttcaagttcaagacaaccttccatcttcttaaatggaaatcttctattgctgttgcggtagcaacgtaactcgtaaggtcatagtgaaatagaatattctatttactatgcactcctgttaaaaaaattaaatgccctcaccaggaaaaaaaaactcctttttggacatatgaaccaatttttggattaattatatttttagttctgaatttttttttaactttttacttttaatttttttaaattaaacaattttaatttccaatatttacttcagttttcttttttcatccttgacgttaaaaatctgttctgtgttgaaataacagttggattttaattatttcaaaatatttgtaacaatttactatgtgacaactcaaaatcttaagtaataaaacaattttgtttatgtatgaaagaaagttctcctgttaatttttctctaatttctctcacaaagagccaaaagatatttgagctccaatggtcatgtttaaattaatttggataatttttccataaacacttactatgagaagaagaaaaatatttttttcaaaaattaaattaatttatgtataaacagtcatttttaaagtttctcttatattacgtttctttaaaaaactcatttttaatttatgtataaattaattttatctttaaaactcatttttaatttgtgtataaattaattttagttttgaaagaaattaacttattttattttttcttatatttttatcttataagtgttcatgaaaaaattcatccaaacaaactcaatcttttgttgtattcaaaatttaaaaagaagggggaaaagaatataaaggaagtgagttttattgtgtggtggttcctatttcagcttatttccttctaatttggaaagaacaaggagaaagagtgtgaaaataagtgaaaaaaaaaacataaataaccttaagtaataaaataatttttcaatttatattgttaatttgtttttattttattataagtagtaaaatgtttttttaatttattattatccttttaatttatcttagcttgtatcttgactagtttttttttttttttgtattacagctaagagcttaattttatattcttattatttttattatattttttttaaaataatatttatgttattttacagatatacgttttttttcttctcagtttctacataatcaaataagatttgagtttttttttttttttttacttttcactttctttccttatattttttttcttccatttttttattaactaaattaaggttattgttaaaaaccgatgccatcttgcacccttctatatcatgtcctctgtcattaaaatgatttcttaaatcttatttgtcattatcaagaggttttgtttttgtcagcgaaataaattttagtcattagtaagaggatatttggataagtttatctataagaacttctaggtgaaaaaataaggaaattttttattcttatattaaaattagtttattcataattttttttatagaagctttaatttctcatattaacttcttcaaaaactgattttaatctctctctctctctctcacacacacacacacacatatatatatatatatatatatataaatttaaaactatgattttttccctgtgtttctagaaatttacctaaaagaagaaatcaggatgttaggaaaattataactaattttgttatttaatataaatattccaaaaattatattttgcattgaccttttcataacattatcacctcccattatataatgcaacacaatcttgaccctgacttttggcttttatgtttttgtcaacaaggcctttttcatgacgttattgggacggagaggatacaaggaaaattataactaaactggcattttaggcagcacattacatatgataaaatatttatttcatatgattaaaattgataataaataaataaataatttaaaatatataaaatatattataattaaaatatgtaataaataatttttttacatataaattatattttagatttatgaaaaataatttatattatgatatattattgtttttaattataaaaatattattttaaaaatattgaaattaaagttagaattaaatatattaaaaataatagattgaaaaaagataaaatgtttagctaaattattcaattgatgtaaaaagcataagagatactataatatcgaatgcatgttaaaaagtgtattgtaagatataaatatgaaattagtttttgatatttaggaacaattaaatacttaactcgttcttgatattaaaagtatcatatgcatgctacgtgcgttaaatacacacttgataagaggtagaggagaattcaaatgagaacgaataagagtgatatagtaatatacaaatttgtttgacaaaaaaacccaatcacttccactacttaaaaaaatgtagtttaagggtattatagtaattgaaatatgtttgttagaaataatatttttctcttttctccactgatcattctctcctgtctctcggttccatccctcacgttggtctaacccaaagtttcaaactttgcatgcatcttcttactccaaatttgtcatcggtccacactcttccatcaacaattctcatttgcacaccaaaagaaccgctcacacctgagtttgttgaatgcgactaagagagagaaataatattttaaacaaacaaatttgagttattaactatatttattaaagtagtggaaggattgattttttttgtaaaacaaattttggtgtagattactaatctactctaactggaaaagaagtgtcagtgtgttagtaattctcatatataaatattttaaaatatatattttattacattaatcttttcatattgaaaggtaaaggaaacatagagagatagataaatggctagccgtggagagactgcagagaatccaaattctttcactgtcactatcaccttgaccttgcattgtggaatgcaacacaatccttgacccagacttttggtttctttatatttttctcaacaacttggcgttttgcctgacgctcttaactaggagcatttaccttaccttaattttcggtggcttttcaattgctatttttataatccaataacttcattgtttggtgtttgccaattatttcggccaataaattggattcttcagattatctttttgagttctcaaaacttttttttttaatttgagtagaattattttagatagaatttaaaaaattattttcataactaatataatttatttttaaccaacaaatgactaatctgagaaatgaactcggtctcttaaacaagtttttgatttaagtcaataatatgataaaaaaaatagaattaattttaaatgagatttttttttgaaaaacatatttatattttcaagatatttatacttgctattatttaaagtatttttttgttttaaacttgttttaacatcatcttaaatataaatgcatttttgaaaatattggtattcttttgaaattaatcgataaaaatataaactaaaagtagacaagtagtgaatgaatgcataacccaacatttagtataaaacaaacggataaccaatcatttagatatcaatcggaattatctcccaacctgaatagactggtgaggtgcgttagcgtgggagttacttcaacatgttagaaaacaatatacttgagtaaatctgctggactatatcttcactaagtcggaagaactatacattaagcaaaaaccattaatttatcaaaattatcattttagttgcaaattttaagataattaggtctgtaaaattattaaattttcaaaataatttcggaaatatattgtacattgttgatgaaattaatcgtctaaaatgtaaatgtctaataatcgtttctaatcaactaacattagacatgctaatgtgacacaaccatgttgcctgacacatgatagcctagtcataaaatattatcattttaatatagcatgaaattgtaggatttctaaaattcataaaattcgtacgttaatttagttcctacaattatcaaaatttaaaaacaatttctaaaattgaaaatcgtggttcacaagttaatccaattgtcaccttcttaatcaactaacaatgtcaaacacaaatgtagtaggttaagtgttctacacgcctccaaatttactcatatgtgtcagtttgaccaatgacgttttctagctataacattcgctcctgttttttttttttttttcttcaaaaatgtgcattgaccctagaatatgcataattagagccccaagaagaaaaatatagacgcgatgtaggaccagtcatgtagttaaaaaaaagacagtgaaaattttagtgcatttggaagcttgatggttaatgacttggaaaataataattgtaatttgagagaattttttaaggataaattgagagttgctatggtacaaataagtataaggattttgctataattttttttaccaatgattgaatgaatttgagcacactaataaagaagagatagggacagagaagagattttcaatagcagtccaaaaaccctcagattttcaaggatgcgcagaatataatatgaatatttcataaagggaaaactttaatattaacagtaaccaaagataaaaaaattaagaacaaaatataatatataaataagttaggtgtttaatgtcattgaaaaaataatagtatagtgacacgtagtatttatgattttactcaaaaaaaattcgtgaggtaaaggttagacaagtttcacatcatatattctttaagtaatctctaaaaattctcagtagtttagcattcaggtgttgaaaatcgacaatcacacacaaattgaaaaaacagaaaagagaataggaaagagagatatgacacagtgatttatcctggttcacccaatgtaggctacgtccaacttgtctgtactataatcacctcaccgccactcgttacaaatcacacgatttacaaagggaatataaataggattaaaagaaaccctaacagtagctattcatgggctctagcccaaactactaataaaagtaaaatattacaaataatcagaggcatatccaacattaggcgttatcatttttaattgttagaattaagaaactaattctattatgtatgatgttttaccgctaagaggacaacgcattttattaggagaaatgttaacgatattatttttattattaatgtgatcaactaaaatttaatttaaatttattataattattaaattttatgagtcatatttattatttgatgattttatttcataatttaaatataagattcatcaaaattgattattttttttttaaaatcaattccaaaaacagtgttgaaaacaaaatttgaggttatatttctctttattatatataaaccattggatcttagtagcttactagttactttatattaacattaaatatatgcaaatttatgtgacatatgttaaaagtacacctgttattaaaatatgtttttatttatgtttaatgttgcattgactatgctgtccaaaaacctgttgcattaactgttacataagactttttctactggagaaaaagatactacctcgggattttatatataaaaaataaaagataatatttttttattaaaaagtaaaagataatatcttcttggccttaattaagaattaaaattcaatttttcttgacccactctgcagcattctttcttgctgattattgactggttttctccgattctaaccagtttttcttcaagttgattttattgattatttgaaccggtcataagatcaattcaccagttttttggtctgatcggccaattcagttcgatttttatactagaaaaggccacaagaagatgagagagaaaattgtaagatatatgtcccataatagataaaacaaaggttaaaataaaaaaaaaattatatataacagggctttacatgtaaatgatagaactatattattcatatacttttttataatattatttttatctttttcaattatattaattattttacttcgcacttcaattttttattataaaaatatatacaattttgtgcaaatatatatatatatatatatatatttaaaagaatctataatcaaaacaaaatttaatttctatgcatgtcaatgtaaaaaaaaatgacacactcaaccaataaaaaaaataataaatatgacttttatgataatcaataatattataaaaactctccacttatctccacgtgttggctaaataaattttcagaattttcttaattgtcatttcacttttttcctctcttttttatttttgtaaaaattgtgcaatagtacaagcatatatttagttattgttaaattcaacaaaattatcatatatatatatcatatatcgacaatttgtataatataaaaatcttttaccatcgattagtttatatatgatttactcttaaataaatatacttatctatttatttataatatataaaagttgaaatatgaattgtggtgttgacgtttaaactacttgattaacataataaatgtcgtagcacatcaatggtttatcatttatgtcatgtcttggttaagtatttcccttcctctcaagcaattaattagccacactcccttcgatcaattatttatctttcttcttaatgtatgatttattacatttctttcattatgatatttcaattactcttttgaatgtaagttactgacgttttcttcctgaataacctatttatataatggaattagtctgcttcattgtctacatgagatcaaagcaccaagtatcaacaacaaaaaaatgttaggataaagaaaaaatatatatattaaggacactgttttaaatttaaattattatcaaaacataattttaaattacatattactttagcgtaacaattataatattaaaagaaaaatatcttgaatttaatgactatgcatggttaaagtaaaattttatataattaactaatcataaattagtacaagtataacttataaaatagttattagaagagtcattaaacttatatcatttgataataatataaaactactttaaagtataagtattggataataatatataaagagaaacaatagaaaaagtacaggtataaattatgacaaataatataatttgatataaaaaaagagaaatagaggaaaagaaagtgtcaaataggtattaaatatgagtatccattttttttggctaaaagataaatgggtacccatatatcattaggaaaaatataatttgataccaaaatatttgctgacacccagtgaaaaagaaaaaaaaaaagagaaaaatataaatatgatagatgaaataatgtgattaaaaaaaaattgttaatgaaatattgatatgtgaaaatatcactacttatatcattagtgatcattactcatgagtcataactatatacactatttgtcaaatatttaagcgtacgcgtaacgggcgggtaaatatctagtaaagagaaaagctaagcaatgcattgcatgccagctgcagccgaactattataaatacacatcttagtaagaaattaatatcataaacaaacctaagaagcaaacagcaaagtatggctttgttttctcaattacctgttcattttgccttattactctttttcctctttcttgatctacacaaccttttgcttggtgtatcatcagccactttaagcatcacctctgacagagaagccttgatctcattcaaatctcaactgagtaatgacactcttagccctttatcttcttggaaccataattcatccccctgcaactggactggtgtcctgtgtgacaagcatggccaaagagtgacaggcctggatctttcaggcttgggactctcaggtcacttaagcccttatattggtaacctctcttctcttcagtccctccaattgcagaataaccaactcataggactgattcctgaccaaattggcaacctattcaatctgagagttctaaatttgagcactaacatgttagaaggaaagcttccttcaaacaccacccacctgaaacagctccagattcttgatttatcctcaaacaagattgccagcaagattcctgaggacatcagcagcttgcaaaagcttcaggctttgaaactgggaaggaatagcctctatggtgcaataccagcgtccatagggaacatttcttctcttaaaaatataagttttggcaccaactttctcactggctggattcccagtgacttgggtaggctccacaacttgattgagcttgatctcactctcaacaatctcactgggactgttccacctgttatatacaacttatcttcccttgtcaacttggccttagctgcaaactctctgtggggtgagattccccaggatgttggtcaaaaacttccaaaactcctagtgttcaatttctgcttcaataaattcacaggtggaattccaggctcattgcacaacctcaccaacattcgggttattcgcatggcttccaaccttttggaaggaacagtgccacctggtttgggaaatctcccatttcttcgcatgtataatattggctataacaggatagtgagttcaggtgtgagaggtctagacttcatcacttctttgacaaacagcactcacctgaactttctggctattgatggtaacatgctggaaggtgtaattcctgaaagcattggcaatctctccaaggatctcacaatattatacatgggacagaatcgtttcaatggaagcataccctcctccattggtcgtctaagtggcttgaagttgttaaacttaagctacaattcaatctttggagatatcccaaatgagttaggccagttagaggaactacaagagctatctctggctggaaatgagatatcaggaggaattccaaactcccttggtaatctcctaaagttaaaccagattgatttgtcaaaaaacaaacttgtggggagaatacctaccagttttgggaatttgcaaaacctgctttacatggacttatccagcaacaaactcgatggaagcatacctatggaaatactcaatctcccaactttgagcaatgttttgaacctgtctatgaactttttgagtggaccaatacctcaaatagggagattgattactgttgcctccattgacttttctagcaaccaattgtttggtggcatccccagctcattcagcaattgtctcagcttagaaaatttgtttttggcccggaatcagctttcaggtcccatcccaaaggctcttggagatttgaaaggcttggaaactttggacttgtcctccaaccaactctctggagccttacctattgaactacaaaatctacatgtccttaagttcttaaacctctcgtacaatgatttagaaggagcaattcctagtggtggagttttccaaaatctctctgatgtccatttagaaggcaatagaaaactctgcttgtacttcccatgcatgcctcatggccatggaagaaatgcaagactttacatcatcatagccatcgtggtaacattaatactatgtctcacaattggcttgctactgtatataaagaacaaaagggtgaaggtaacagcagcggcagcaacatctgaacagctgaaacctcatgcaccaatggtctcttatgatgaacttcgtctggcaactgaggagttcagccaggaaaacctattaggagttggaagctttggctcagtttataaaggccatctaagtcatggagctactgttgcagtgaaagttctcgacaccataagaactggctctttgaagagtttctttgcagaatgtgaggctatgaagaactcaaggcatcgaaatttggttaagctgatcacatcatgctctagtgttgacttcaaaaacaatgattttctggctctggtgtatgagtacctgtgcaatggtagcttggaagattggatcaaggggaggagaaatcatgcaaacggaaatgggttgaaccttatggagagactgaacatagctatagatgttgcttgtgcattggattacctgcacaatgatagtgaaatcccagttgtgcactgtgatttgaagcctagcaacattctattggatgaagacatgacatcaaaggttggagactttggattggctaggtcgctgattcaaaactcaactaatcaagtttccattagctccactcatgtccttaggggctcaattggttacatacctccaggttagaatccttacaactttttctttatcaaccttttaattaattccattacaaattgtgaaacatgataaataattagtattgttacttgcccaatgcagagtatggatggggagagaaaccatctgcagctggagatgtatacagttttggtattgtgttactagagctcttctctggtaaaagcccaacagatgagtgtttcacaggaggcctaagtataagaagatgggtgcaatcagccataaaaaacaagacagtgcaagtcattgaccctaagttgctgtccttcactttccatgatgacccttctgagggaccaaatctgcaactcaaatatttggatgcaactgtaggagttggcatatcttgcactgcagacaacccagatgaacgcattggcattagagatgctgttcgccaactaaaagctgctagagactctcttttgaaactgtctgatgagagtcctacaagagataccaagcgttacttccatgtttcaataaagtgaaccctagactctagtcatgtatggttgaaatagaagcatttcgaccaccaacctttaaatagggtattaattaaataaataacaattgtgtttatgtttatgtgtaactctatctcttgtaaaacttacttatgactataaagaagaatggtggatcacactttgtgcgaaaaagatgattattggcactgcttatatattaattcaagcaatttttttttatcagttaattcaagcatttttaattaagttttttgttagttaagtagtttattttgatttacaataacattatttatttacaccaggatatctctctattgacaagagagtagaaactaattcttttagcaaggaagtctaactttttattattactattatttttggaataattaataatattagtaatgttgttccttttattgttatattatactataaattctgttgataaataatattgataaaaaaactcgactaactatttttgatagaattttttctctcgatatattttttcatcacttgaatctaacaccttgattaagagatctgactttagttttaaaaaatgtaatattagtttgttgttacttttttattaattactatcattgttttggttattattttattcatctgagtccaagaaacactaatgatgaatacaaatattctaattaccactgctacattattttcatattaatatcggttatatatatttttctcttgtaatcttgatttagttttgtgatagaccaatccttaatccaacgtgcatgcatggctgcttggaagaagaaaaagaatatacctagagttgttgcgcgcgcctagcccagaagcacagctaccatccctcaaatgaaattttctctctagccacaacactgacattttttggaactacatgtacatgcagttctgattgtcacactctgacgcaacgaagttttaaacaatcttctgtctcggccaagcaatatggcgtcaccgagaatagaaaaaaaattatgaaacaaaattaaattaatgatagaaaacgtgcattgggctagcgggaaaataaaaggaaattaacaaataaagagtgaaaactgaaataggttcaaaagattcgcagaaaaaggacaagagtaacggtttcagtgcttcatcaaactcatgttagcttcaagagagaaagaaaaggggcttaaatttttttgatcgaaaggaatcaaaccaagtaacttaaggtttataataacttacacgtaagactaggttaagacacttttggcctttggtagcctgaatagatgtaatgtaaaataaagtaatacccagagacgtagaaccttaattggtataaattttggaaatctatttcaaagtcatataaaaaatctgtacagcttaaattacaagttttctaattataacctttctaagagggctgtttgctcttaatttcctatataaaaaaaaaattggattttctaaaacatagcactaaatttcaagaagacaaataatatatttaataagtcaagacttaaattatatttaagttgtaagtttttttttcaaaattaactaaaataaatttttgttttaatgtgaagaagaaaaaatccattaataattgcaaggataaaaagtactaataattatcacaatacaaaaaggaaaagatgttacattttgaacaaattatatgccatcaaccaccattcttctttacataagttttataattgacaaggttggcggcagaaatgtgtctcaatttctaccattcatgactagagcgattaattggcctaaaatagtaaagtatttgatcattacatggtcaacaaaagtattattatattatatattattctttgcgcttatttcaacccgaacgtttcaacttgtgcactactagtatttgtcaaacatggctgcaaagtgtaaaggaccgtacggtgccaaccatctatctgactctttcctatctcggaacagttcactttgctgaaacatggacgcaagacttggtatctctagtactagtaggtgtaagactcacgtcatcagactgattcaaaagagagtctctagcagcttttagttgacgaacagctactctgataccaatgcgttcatctgtgttgtctgcagtgcaagatatgccaacccctacagttgcatccacacaattgagttgtacatttggtccctctgaagggtcatcatgaaaatgacttgcactgtcttgttttttaatattgattgcacccatcttcttatgcttaggcctcctgtgaaacactcatctgttgggcttttaccagagaagagttctaatcacagtgcacaactggaatttcactatcattgtgcgggtagtgcaatgcactagcaacatctatagctatgttcagtctctccataaggttcaacccacttccctttgcatgctttctcctcccattgatccaatcttccaagctaccattgcacaggtactcatagaccagagccagaaaatcatttttttaaagtcaatactacagcatgatgtgatcagcttaaccaaatttcgatgccttgagttcttcataggacattctgcaaagaaactctttaaagagccagttcttagagtgtcaagaactttcactgcaacagtagttccatgacttagatggccttcataaactgagccaaagctttcaactcctaataggttttcctggctgaactcctcagttgccaaacaaagctcatcataagagaccattggtgcatgaggttttagctgttcaaattatgctactggtgctaccttcacctttttgttctctatatatagtattaagccaatagtgagacatagtatcaatgttaacacgatggctaccattatgtaaagtcttacattttttcttccttggccgtgaggcatgcatgagaaatgcaagcagagttttctatttccttctaaatggaccgcaaagagattttggaaaactccaccactaggaatggctacttctatatcattgtacgagaggttcaatagcttaagcccaagtaacttttgaatttcaataggaatggttccagagagttggttggaggataggtccaaagtttccaagcctctcacatctccaagagcctttggaatgggacctgaaagctgattcctggccaaagataatttttccaagctgagacaattgctgaatgagctggggattccaccatacaattggttgttagaaaagtcaatggaggccacactactcaatctgccaacttgaggtattggtccactcaataagttcattgacatgttccaaacattgctcaaagttgggagattgaggatttccataggtatgcttctgttaagttggtttcttgataagtccatgtaaagcaggttatgcaaattcccaaaactgataggtattcttcccgcaagtttgtttcttgacaaatcaactaggtttaacttcaggagattaccaagtatgttagtaatacctcctgatatctcatttccagccagagatagcgcttgtagttcctctaactggcctagctcttgtggaacttctccggagattgaattgtagcttaacaacttcaagccacttagatgaccgatggaggagggtatgcttccattgaaacgattctctcccatgtataattttgtgagatccttggagagattgtcaatggtttcaggaatcacaccttccagcatattgccatcaattgccagaaatttcaggtgagtgctgtttgtcaaagaactaatgaagtctaaaccactaacacctgaactcactatcctgttataccgaatattatacgtgcgaagaaatgggagatttcccaaaccaggtggcactgttccatccaaatggttggaagacatgcgaatgacctgaatgttggtgaggttgtgcaaagatcttggaattccacctgtgaaataattgaagcagatatggaatactatgagttttggaagtttttgaccaacatcttgaggaatctctccccacacaaagtgtttgaagctaaggcaaagttaacaagggaagataagttgtatatagcgggtggaaccgtcccatggagcctacccaattcactgggaatccggtcactgagaaagttggtgccccaactcatacttttgagagaagaaatgttccctagagatgctggtattgcaccatagaggctattccttcccagtttcaaaacctcgagctttttcaagctgctgatgtctcaggaatcttgctgacaatcttgtttgaggataaatcaagaacctgaagctgattcaagtgggtgatgtttgaaggaagctttctgataggaggtggggtcaaacttatgcaagggggtttagatagcaatttaatagttagtataactaagctgagttagttataaataacagttttagagagaaatgtataagaggggagcttggagaggaaaagaggggggaattggaggttgtgaccctcgaagccactgtgtaatcaagaattgtgcttgtgagttgaataaagcatttttgttctctctatattctgtaccagtacctaacactggtatcagagctccactcctggagcctgtgaggtgaatgggtacgaaaaacagcaacaagatggatgccagaattgacgtgatggagagagcgctagaagagacgcgcgaggctagggagattgatcgcgaggccatggaggcttatcaggtcgcaacagaggctaaccgggtcaagatggaaacccggttagacggaatcgaaagaatattgcaaaggttggctgcgactctggaaccaccgacgagggaagagcgtaggcaagccggagaagcaagaaccaagaatcgcgagagagaggagctagaggcgcgacagtggcggcagattgagatgccgattttttcaggggaagacccgataggttgggtggcgcgggtagaacggtttttcctgttacaacatgtgagtgaagaagagaagttagaggcgatattggtagctatggagggagaggccttggcttggtatcaatggtgggagaattggagtgcgcatcagtcatgggaagatttcaaaacagctgtgatacaaagatttcaaagctccaatttgggaaatcccttccaggttttgttatctttaaagcaagaggaatctgttcaagaatacattgggctttttgagaaacatgtaggtgctggtaaaggtttgggtgagaattttttaatggaagtatttgtgaaaggattgagagaagaaattgggactgaggttaggttacatgaacctaaaaccttgctggatactatgctgaaggccagacaaattgaagagaaaaacagagtatgggagagggtacctagatcaacaaagtggatacctcctgtggccaaatctaattttactgggtccaggaatggaaaagattggcagcaagggggtggaagggcagtggaagttagtagcggggctaaaacaagtggtgagggcccaaacaaaaagaaaacttttcaaagattgtctcctttggaagtgaatgagaagatgcgtaagggagaatgctttacttgcaatgaaaaataccatcccacacacgtatgtaaaaacaaacagctaagggtgatgattttggaggaggatgagagtgaagatgaaatggagaatcatggaggctgtgaagaagaggaggtggggaaaatacatcagctgtcattgcatagcattgagggatttacttctaaaagatcactcaagctatggggaagaatcaaagataagaaggtagtggtcttgattgattgtggggcaactcacaactttatttctatgaaattggtgcaggaattaaaattggaagtcactcctaccaaaacttattatgtggaggtaggagatggacataaaataagctgtcaaggggtgtgtaattcattgcaaatggagttacaagggctgcatgtggtgcaaaattgttacttatttgatttaggaggggctgatgtggttttaggtgtggagtggttggctgggttgggagaagtgaaggctaattttgataagctcactttgattgttaaggttcagaatagaaaggttgtgcttaaggctgaacctgaattgcttaaatcggttgttagtatgaaactgataaaaggaggtatagaagaggatgagcagaggtttatgttggaagttaaaactgcagaacagaaacaaggagcagaatggatacctgataaggtagaacaagtactgaagatgtttgaaggaatttttaaagaacctcaagggttgcctcctcaaagagagaaggatcacactattactttgcaacaaggtactaaaattcctaatattagaccttataagtaccctcattatcaaaaagatgagattgaaagattagttagagagatgttgatggctggtattattaggccaagcaatagcccttttgctagccctgttattttggttaagaaaaaagatggaagctggaggttttgtgtggattatatgaggcttaacaaaattacagtgcctgttaggtttcctatacctgtcatagaggagttattggatgagattggaggtgcacaatggttttctaagttggacttaaggtctggctatcatcagattagaataaaggaagaggatgtggccaaaacagcttttagaactcatgaagggcattatgagttcttggtcatgccttttgggttgaccaatgctccttccacttttcaatcactaatgaatgaagttttcagaccatttttaaggagatttgtgttggttttctttgatgatatattggtgtacagcaagaacttaaaggagcatcaagagcatttgaaagcagttttacagaaactgcaacagcaggaattatatgtaaatagaaaaaaatgtatttttggtcagaaggaattggagtatttgggccatttgatttctggagaaggggtagaagcagatcctagcaagctggaagccatgagtaaatggccagtacctaaggacataaaagggctgagaggattccttggtttgactggatattacagaaggtttgtgaagaactatggaaaatgggctcaaccattgaatgctttactgaaaaaggatgcttttcattggaataatgaagctgataaagcatttgagaaactgaaggaattaatgagtaatcttcctgtgctaggggtacctgatttttctaaaacctttgtgttggagactgatgcttcaggatcaggattaggggctgtactatcacaagaaggcagacccttagccttttggagcaaggctttatctgagagaggacagttgaagtcagtttatgaaagagaattaatggcaatagtattggctgtaaagaaatggaaacattatctgttaggaggaagatttatcataaaaactgaccagcagagtttgaaatttttaaatgaacaaaagttgttaactgaggaacaacttaagtgggctattaagttgattgggtataattttgaaatccagtacagaccagggaaggagaatgtgtagctgatgctttgtcaaggcaatttgcttttgcagcagtttctatggtccaggagaatgattgggttgaatgggaggaagaattaagagcagaccagccactatatgagatttatcaaggtatcatcaccaagacaatggagaaacctgggtatgtagtgcaaggagggaagctgtataacaaaaacagattagtgttaccaaaaaattctgctagaattcctttaatgttgaaggaattgcatgattcatctattggagggcattctggttttttcagaacctataaaagaatagctgatgtggtttattggcagggcatgaagaaagatataaggaattatgtggctgagtgtgaaacttgtcaaaaaaataaggtcagtacattgtctccaactggattattacaacccttacccattccaagcaaggtctggactgatatatttatggactttattggagggttacctaaagctcaagggaaggataccatattagtaatagtggacagattgactaaatatgctcattttttggcattgtgtcatccttttacagcaaaggaagtggctgaagtgttcattcaagaggtggttagattacatggatttcctgcttcaatagtctcagatagggacagattattcatgagttcattttggaaagaattatttagaagggctggaacacaactgaagtttagttctgcctatcacccacaaacagatgggcagacagaagttgtaaataggtgcttggaggcttacttgaggtgtatgacaggaacaaaacctaggaattggcctagtcagctagcttgggctgaattttggttcaatactaattacaacatatctgccaaaatgtccccttttcaggcattatatggacaagcactttgtgggtaaaaaacagtgatattccttctaaactagaagaagtagagaagctttgtattgatagagatgtgttgttacaggagttaaggagtaatttgctaaaatcccaggatcatataaggaagcatgctaataaacgtaggagggaagtgagttttgaagtgggagattgggtctacttaaagatacaaccatatagaatgaagtctttggccagaaaagtgaatgaaaaattaagtcccaggttttatggaccctacaaaataatacagaaattgggtgaagtggcttacaagttagaactgccagcagacagtaaaattcatccagtttttcacatttcattgcttaaaaaatcagtcaaagcaactgttgtacctcagccattgccagcaatgttagatgagtagtgggagcttcacatgcagccagaaaggattcttaaacagaggacaaatgcagctgggaaacaagaagtgttgattaaatggagagagttacctcaccatgagaatagctgggagttggctgaagaattacagaggatgtttcctaaaatggaccttggggacaaggtccagcttcaaggggagggtattgataggaggtggggtcaaacttatgcaagggggtttagatagcaatttaatagttagtataactaagctgagttagttataactaacagttttagagagaaatgtataagaggggagctcggagaggaaaagaggggggaattggaggttgtgaccctcgaagtcactgtgtaatcaagaattgtgtttgtgagttgaataaagcatttttgttctctctatattctgtaccagtacctaacactttccttctaacatgttagagctcatattagaactttaatactgaataggttgccaatttggtcaggaatcactcctctgagttggttattctgcaattggagggactgaagggaggaaaggttaccaatataaggacttaagtgacctgagagtccaaagcctgaaagattcaagccagttactctttggccaagcctgtcacatagaacaccagtccaattgcaaggagatgaattatggttccaagaagataaggggctaagagtctcattactcagttgagacttgaatgacatcaaggcttctctgtctgtggtgatgcttaaagtggctgctgatgatacaccaatcaaaaggttatgtggctcaagagggaggaaaaggagtaacaaggtaaaatgagcaagaaaatgagagaacaaggctatagttgctcctttagttttggttatggtataaatttcttactaggacatgaatttgattgtattatctctagtattcattaaatattgtatacaatatctaatgaatactgtttttcttccatgtataaccaaagtgccattttcatgtgtttgacttaggttcccttgcacgaaacattttacagcgaaagaaagtatttcttttcacagcaaaaagaacaaaaaaaagatgtttgtacgtgaaaaaagtcttattttcattttacacgggaaaaaatggttatgaaatcatgtcataatatatgtttaatgttgcattcaggattacataagactttgtctactcgttaaaaagataacaaattcataagtacttgctcattaaaaaaaaaaaatacatctttaatttttatatacattaaagataaagatatctctaaccaataattgaaatttaatttctttccatacataaagttcatcaaaataaattttgtctctactaacaaaaaaaatcatttacttgaccaaaaatctaaccctaacaacatgcttaagtagtatatacatgatatatatgaggtagtgttgatcgtgttaatataagagtgtatattctacttgcttttctttcatatctattctttgatttgtttccgggtttcattagattgttcagatccaatcctcttagggatctattcacagtattggaaatatatacttatatcattccttcatgtaaatcaaaatatatagtatacagtttcaagtacattacaaatacattattaaaaaattaattgtgtttagtattgcatatagtacatgaaacagtttatataattatgacgtttcagaaaataaggatagatttaaaaataaaataaaaactgaagtaaaaattgtaaatagacattttgaatttccaatctgtcaataactccacctcagcatcggctttctagcaacatatcattcgtcaacaatataaaataattttaccaacaatacattaaaattaaactcctgaatatatacattgcacaaactacacagatgttcaattatgttaacaagatagaatagaaatagacttaaagcagacaagattcatggcttccacaacttcattgtgcagtcttcactaaatgttgcaacaagattcctatggggatgatgagtgacacctataacttccttctcatggacctgccgttagccagagagaaattcattatatcataaataaattcatatatcaagataacaacctcagtagaaaaataagcatattgtctcggaacagaatacgagaaaataaaatcccatttaaccatacgcaaggcagagagggttgatcaacagagaatgcacaacgtattatctaaagaaatgagcttcaaggcataaaaaaccaccaagcgggctgattccagttctagttagtttttacataatttacatggttccccatttttaacaaaagatgcaacaagatgaaggtggtaaagagttgttatttatataactcaaataacaatatgtacacttttttttttgtctatctgtctccattatatcatttatacatttcatatttctgtctttctctctctcttagtcatacaaattgttttataaatttttggacaaataacttttctcggtgacataaaaataccaaagaaagacactaattcaaaacatgtaatacgataatatatatataaaaacagtattacaatatcgatgggaattgagaccaatttgaaacaaatttatagatctaatctctgactaactacatataaaattacacataccttcattagatgctccaatttgccagattgatagctgaagcagtacatattcctgcattcaatttacagttccatgaagaatataacaatttttggaaagataattggtgaattagagatattatttcgacaaaaaaaaaattattgatttggaaaatgtcatcaaactcacttatggtactgcaaaattaggctaagttattgtgcttaaggaatatgggaaaatatcaatcataaagcatatgtgatgaagcagtttacaaaatgtacttaaaatctttgtctactggattaaacgaatccatgaagaatataacaatttttggaaagataattggtgaattagagatattatttcgacaaaaaaaaaaaattactgatttggaaaatgtcatcaaactaacttatggtactgcaaaattaggccaagttattgtgctcaaggaatatgggaaaatatcaatcataaagcgtatgtgatgaagcagtttacaacatgtacttaaaatctttgtctactggattaaacgaaggagctgtgtcatattatacataaataggatacctgtcttcaccaacacagtaaatccattctcctttaggggaaacacaggctgcaacaaagtctccaccttctcttttaccagatgagaagctcttcacaacctatcaattgacagagaaataatgatgaactcaattttcataccttgcaattagatcctaacatgctgctacaacacttcattgtaaaaactgatgaaaagaaatgagaacaagtatagcccaaggttctccaaaccgcacgtaagtaaatatccacattcaggcagcatgaatatgcagaattacatatatacttatccttgtcagaacagacaattcattaagaaagacaatgccaacatcaataattctaatataaagacactaatgaaataagtataaacaaaataacttccagtcatccactcttttatgtatacctgtccttgaagtgtcatgatatatatggatgacgttttgttacaaacaacaatgtgatcagtattcttggggaaaatgtgaacagaattgacagaagcatcacctccctaacattccaaagaaatcagaaattagaaaaatgaacaaatttgctgggatgacatcagaaaattgaatagcaaaacccataatagtaaatttttgaagacacactcttaaaggaggaggtggcttaaaagtttgtatgcagtctgtagtcttcacatcccagacctacaatatggaggaaaaaatacatctcttatgaacaccagataaacaaggaacttcaagtacaatgccaagtaacagaccttgattgtacagtcacttgaggcagtaataacacgactcccatcatttgtaaaaattgcatcattcacataagatgtatggccacggaactctttcaacatctttccagatttgaggccatgaattctgtattacaaaaaggggaacattttcacttaacagttgctagcattttatcgttaagatataaaatatactgcagtaataaagcattaaagatttgaacaaggagttgtgctctaaattaaagaataaagagcagcacataaatgagtaatttcatttccatttctccaatatctctaataagaatcctctcacaagctctagcgccactgtttggaagaagaatgaagaggaggctatgaagaatcggaagtacaagaaaaaggatatctctcacttgaagacaatgaaatgatgattatatagaggaaaaggaggaccattcgtgtcctttcagcgcaacttaacctttccagatagttagtacatgacaattatatttggtagatttattttagcatttgaaaagaaaaatatattgcaaccagcaaccaccatgctttcctccattggccgcactgtcaacccaacatttgtatggtggattttaggcttgctactatctactataataatgccaacttctaatcactagatcattcatgctctgcttgttaatttcaagcctaaattttatgtcaggtgagctaatggcttataaatggttatctctaacaaaacaacgttaaataagtaaaattaaatgaaaaaccttgctgtgctgtcaaatgaagtgcttaataactggcttccatcacgggagaaggaaacacttgtgacaccttgagaatgagcacgttcaagacgccgtaagcactgaccagtcctgatacgccagacctaaaatgatatgtgaaatatacagttttaagttttacatattaacatttccaaaaacagcaagtcagcaactacaacatcgacaagaactgaagacagcaaaaattcaaggaaccacaagataatgagacaaagtaggaccatatgaagttataaacacaaatcatagagtgaaatggaatgcaagatggcccaacatgcacaataaataatttataccgcattcatataaatgctcttttttaaaaaaaaaaaaaaaaaaaaagaaagaaagaaaaccaataaagacatattcatcgttaaaaaataaaaatcagcctagacacaattaccactaatctaagacttaatttataagtcaataacaacagtcaagcataagggaagaaaaagacagcgcagattatcacccacgtaaaaaaaaggcatgcaagacaggaaggtgggactgactaagctatgcaaaatagaggtgacagagcaaagacctgagtacataagctctggctgccaaaaaaaagtacaggtttggccaatggccagaaaacactcgggttgctgggtggtacttggtagccagaaaagatgagggaagaatagggaggtgtaaatacagggtgcggtggctgggttttctgtatggatgaagggatactaatcctaaaatcctactgttgcaaaaaatagtgtaaaatcacaaaaatctccctacaaaaatgagtggccaatgccgtaaaagggtggagggtgggcaaaatacatgatttcgccactgcctaatgttgcagccactttacaattttgtccataaaataccaccatctagattgcaatcagtgcaaagcaaaaacacaatgcaagcacaaattaaagctaccagaggccaatcttccccacatcatcactatactattgttgcacaatttgacactattcactattaacccatgcttcagtcatacaatctaaatttcaccaaatgaattttgtttggtagctcagttctatttcacagaaatagcgaagttatatgtgcagtgcactccaaaggagcattttagacaatcctctttttgccatctacgtgggaaagctttatctaggtggctaacttggtggacagccttaacatggtgtacttggaatcttagaaaccagatcctttttcataatgaatcctttaacggccacaaacttttggaagatgccattttcttttgctggtcttggctgaggaacctagagaatggttttgatacccctttccattattggtctagcaacttgagagagtgttttgtacctttggggaggggttaatttacatgtatttcgtctttggttttttctttttgcgcgatctgtcagaacttcgtcggctttggtataaagccatcaaagttctgtgtagatcccgctgttttgtatcttcagcagtactccttgtactgttttatatatatatatatatatatatatatatatatatatatatattatctttgctgatcaaaaaaaaaatatgtgcagtgcacaccttgaaaatataaaaatctacaaaatcaagaatacaagaatttcttctaaaggttagctcatgcagccttaaatgcagataagtattactcactttaatctttccatcttgagacccagatgcaagcatttctgaatctctgctaaagtctacacaaagcacagcatcatcatgcatcatgaacacttcctgcaagttcatagaatcagaaaatgtctaaggcaaagacttttggtaaactataagaaatttcctttaaatcgatagtattaaaattcttagacagcataaatcaagcagatatgttcacaacttcatacacttactgaacacaaagtgaggaagagacaaatcatcaaaacaagacatcgtatcatgaaagaaaatacaatcacatgagtaaaaggagtaatctgtgcataaatttatatttatatatattacagaaccaccaaactgtacttaatgttacagtcaaagttgaaatagttcctaaaatgacaacagagatctgagtgaaatatcttttctacagcttttaatgcagttataaacgtaaaggtaccagagtaacaaaagtgtttggtaaccttggggctaagtgaatcttaccaaggaaatatatcagccaaatatctatttccaaattcatcatcaactatcacatacaagacatttatttattcttggcagtaaagccattcaaataaaaactcactcacatcagcttggtattgtagatctttcttcagctttccacttatgtaatcccacacctagaaatatgtcccaaaaatcaggaagaaaactgttgaaaatgaaactttaaactcaaattatgtatacctcaataaacccatcaactgagcatgatacaagaaactgcccatccggtgaaaagcaagcacattctgcatgactttttgtcccaaactaaacaagcagacacaaaacataagggtcagattatgcaagcctttaaaaataataagacagggaaaataatgatgaataacaaatgtcatatgaaagaaaaatagagaaatggtcagattatgcaaccttcaatgtgatttggcagaataaaactaatcaagctgtgaaacaatgcctaaatgaatatagaaaacatacctttatcgtgtgagaaagagtcgttggatacatgtcatccacatcttgtttcatagcagctgttccacgaaacaaatcaaactgcgttcctggaggaagtaaccctgagaaagcccaaaggaaagcatagctcaatcagctcaatcaagatgtaaagatataaattttcctacaaatagcatcatgacaacctcttagaatgtgggtttaggtctattttggccttatctttagtcgatgtgggacttgggtttttttccaatacatccccttatgcccagacacttttgggcttggtgcgtggatgacatggtgggtggcccgtttgatggatctaggataggctttgataccatcttagaatttggatttgggcctaactcaaccccaaaagctagctcatggggtgagggttgcccaccacttatatattctatcttggcctgatctctagctgatgtggaacttggatttttttccaatacaaccaaacatgccttataagcactacttaggcagttatgccatatcactaagtgatgcatgactaaacacagctgctcacgccacaaagaaggtgttggaggcttcaatgaaggcaggcttagagcgaccataattaaagcggcttgccaacaagaagtttcttttctgcttattattagagaaatgaaagatgcatcatgcatgcatataactgaaatattcatttctagcatctataagttgcagaaatgaagtaaaggctttgtcctggctcccgagccaaaagaacaaaaaataaataacacagtgaattgcataagaaacacaacaaaagaacttgtaagcagatgaccacagtgatgataaatcttaattttcatataaaagttgaccatgaaagtaatttattgtggcatcaacatgttaccatgcaattaccttgatgctgctgccacttcaaagcctgaccaattaaagccatcaatcgggatggtggcactacagtaacttctgctgcaagagctgaaaatgcaatgaaagagaagttattaaagtaaaaccccccaaaaaaagataaataacaaactgtttgtctgtatccctagcaatggaagaagaaaactttcatttccaatcaagaaacagttgttcattaaaataaaaagtaaaaaaaaaaatagtatcacaattagatagtaactactacaaaagtaaaagacagaaaccttgggctatttgagcacgtcgcttctcttttgttgagtcttgataagcctgtcacataggacataaatcataaacccttgtgcaaagaaacaaaatgaagtccaataaatatcaatcctgaggacatggctagaaataaaactacaaaagtcataattcattctataatactcattattccaagaacagataataataagtgttaatgatttttttagtccttgaaaatttcccatcagagttaaagctgaatgatcaaacaattgtaacagagtgcagaaacaaaatagaaaaaagggaaacaagcaacaagttgcttaatttagacaacaatcacaacatgaaattgaaaaaaaaataaaattatagaatgtatttctaacctcatttggatcaaaataagttctaactaggagatgttcaagacgcaaatatctttcaggctgctcttgtttcattacacccatcacctgtgtttgccttaaaatagcacgtgcagtatccagttctcgaagttcaatcatttctaatacaatctgcaatcatgttaaaatacaaatctatttgaaacatcactaacttgactgaaacagacaacattattagagtgttatacagatcaagtgttacagactacaagacaagcgtttatgaatagcaaacagtcaaacactgctgaacaacaattcctgaatatcactttatttgtattggctcagctcaatactcttttagcctaatttgttagcatcactttcaaagtgaagtgggaaaaattgattcccagtagcctacctcatttggcaactatcaagcattctcaaagacaagtgaaattttttaacttactccattgacaagaattgaatccagatgtggggcacaaataattatttatatctatagttaaaaaattattatactttgccatctaacaaaattgtttcttctcaactcactcttaaaatatcacttgcaaatacaaataatatttttttaacctaaattgttccaaaataaattctttcagcatcaatttctaccaaaattaaacaccttttattccacccatgcggagagtggaattaataacttaaaccagttattgaagtccttaagattctctcttttttgaaataagtaattaacacgttgtattttagccaattggggggggggaagaatcacacatgaacagaattctatcccaaagtagagcaggttaaaaattattaaactacttatatagcacagaaaatattacaactcccctaaaatttgaacagcacataattaaaaaaaaaatgattatgcacttaaaagctagtgaaccagctacacaaaaagcaaatgtcaagaaaatgagaatcaacaactcaatatctgaaagggcaccatgccagtagctactacttgctaacactaaccagcaactgagtttaggttaggcagattgattaacaacaacattcatctaggaagattgattagcaacagcattcagcatttcctatgccaactgcatcactattttgaccctcaccagcctctatttcaacatttcagcctatcctaccaaatctcgataactccacccaacctcattgccaaattaaaatttaaagctgttcatataaatgacagggtttaaaagccatcaaaaagtccatacccagcattgaagtttgtgattgagtgaacatacactaaacagtgacaagccataaaccaaagtgagtcacacgcagcacaaaatacctgctcatacaaatcctccaacttattcctgggaagcttgagttgagaaacttgaggcaatatcgcatcccatcttccactattaatatcagcaacaaaggtttcaatgctgtcaacagtgttaagagaaacctggcattcgttctgcagcatctgaaaagtctgatgcaacgaattttctttgcaaaactgaagcacaattttgatgacactgcgaaggggcaaacaaaaattgaaaattacacataaattcaaaagaaaaaagagatctattgtgcgaaagaaccattaaacgagcttcaattagacgtcaaacaaaattgaaacatgtgattcagtaaatgaagaaaattaaattcctatattcaagagctcgcaaatgaaactacttactcccgagcttcaatttcgagcgtagacattgctgctatatcgattggacttacaccaagatgtctgcgtagggttttagtgcagattcaacgaaactctgttttatgttatcacttatcacttccaacgttcttctcaggccataatcgcgttactgacgttctttttattggaacaagtgaacaaacaaatcctatttgctcctacttgcggattgatctgggtcgtcaaacccgatagcccacatgggtagggttttaggccttgttctactgctagacgggcctccctgccttaggtgggctggcctagcttcttgagggatgagttacatacaccattattttttcttatacatcattcatgaataatgcctttccaaaattacccttcgcttttttaacgcttttatacacggatacgtaatattgatacttacggattcgtcaatccgtaagaattttttttttacatgtacggattgggcaatccgtaagcccaatcagtttattttttttatatacggattgggcttacggtttggatttacggattgcccaatccgtatataaaaaaaaataaacggattgggcttacggattgcccaatccgtacatgtaaaaaaaaattcttacggattgacgaatccgtaagtatcaatattacatatccgtgtataaaagcgttaaaaaagcgaagggtaattttggaaagacattgttcatgaatggtgtataagaaaaaataatggtgtatgtagctcatcccgcttcttgatggttttctttgtatcacacacccaaaacaagaaaaatgagttaaccatgataaagattaattttataaaaaaattatttattatttatttttttattaatttttttcttatatataaaagaacctagataataattataatatgatagagagagtataagagaagtgttattagtatttattaagactctcttattataaatattgattatatagagtgtgttgataaactaaagacattgccattttaatgaaatattttaattccttcttttttacaagacaaatatgccatttcaatattggaactaattgtaatgaattaataaaacattaattatggatatgacatctagctcaattaattttctcaatacacacacgtggcatatcaagtaagaagacttttattatgagagaataagatgtgtgaatcttagctatatttttacttgtaattttattaaattcaggaaatacatttatataccagtgatttttttatttattatgtaagttcgtcattgtatttatctatgattatatgatccaaacttatttttattatcctcttgtataaatagagagacccacataaatgaattattatttatgtattgtagatagttttaatgaatactcattagatttgggtctaattattttaatggatacttgacttttgcaagcacgtatagctcttacataataccttttttaaagagttatataaaacttaaaagcaactattatgacttttatttatattacagtggggaggctatggaaaattaaatctccaattaatggcaatatgtatgaatgtccggtgatagtgaagaaggaccagatacaggaccacaaagagcatccatctaaaactaacaatggagacaaacaaaacaattcaaatgacttggcacaacattaataatggaaagataatgtactatgagaaaagtgatgccgagggaaaactaagaatcgggtaacaactatagtatgattattgctgtattaaaaagaattaaattgcttggaatatatatcgatacaactaaaatatagtttgagatattttgtcaagtttataatttttttcattttttatgctgatgtttgtttttattttatactcttatgctgcttcatacattttgattaataatcagttgtctttatgcgtacttgtactttttttaatgggcaagactatagtgacctgacgacagtactaaactactagcagatttcctttttatagtgtgtataaattcctagttaatcttcaattaaaaaggtagagtacaaattaatgtcattgattatgagttttgtctattcataattttaaaagccataactttgatcctttcttcattggcggcaggttatcaagtaatgatacggtctgatatttttagatagataagaatataaaataatatcaaaaaaattacaataatttatacatcctattccatcaactaaatcatacatcttgaccaatacgatctggtaggtaatagcgagaatgtagacttaactcattattaacttacaaaaataatcacgagaactgaaaatctcttttgattgaataacttaattagtgaaaaaatactaagttgatttgatataaaacttcgtgatatatatcctaaaatgaaaaaaaaaattaaatgaagaataattatagattttttattttaaaaattcaaaaattataatataaattataggttatataaaaatcctctttaatctaccttttttaagaaaatttttgcatgtaagtccgtcaataatgattggaacaaatcactgttatgaaaattttaaggtgttaatgtgtgtgttttaatctagattatttaaatatgatctaacagtcaatttataacacttatttcttacaataaaaaaatcacacatatatatatatatagggaatgtgtctgacaagagtcggttttttaagagtaaaaaaagtagttttcttagaaattgttgatataaatggtttaacacctagtttccttaattaaggtttaagatttgatctttggtttgaatatagagtcacaactaaaagtatcattttattttaaaatgggtccagaagaggagagataattagttggatgtcaaataaaaaatcttgaatacctctcattaaacaaaaaacaaaaaagagaataattttgaacgatcaaaccatacataaattttcaagattttaataacatgtcatgtgcctaatgatgacatttaccaatggacatttgtcaaaagtcaactctacgcccattgttttatacgtagggtgagagaaaagataataaccagcaagaaatataaataaattatatacatgatgccaagtagagagatagataggtacaatagacaattgcatgtagttagaaaagtcgctatgtgtggaaaagtttgttttgtataatctttgactaaatcatgatttgggtagggatgtttatgagtatgggttaagcgtgaatctgaattaatatgaacaatttaagttaggttatttatgtatttttgattgaaattgttcatatacggattgagtcacaagtctagatttatagatccgttgatccgatttgtcaactcgtaataaaaatataaattttattatttatttatatatatatatatattaaaatttaaaaataaaaaattattttgacaataaaaaaaggtgtggggccgaatgaagagtcagcctataatcatctcatctcattcttgctttgaaggtgcggtattataaatgtcacgggtttatgtttctttttcttttgcacttctgtgttctgtcttatctcatcttcttctttgtgcttcattgcttctgttctctctcatttcatcttcttctttgcagttctacaccagctccttctttgttctctctcatctcatctcatctcatctcatcagatcgatcaagcatcaagttttcctttgcgctttctttttcttttccgaagctttttaacttcccgtgatttttctgatttgtattcattgggattttgatggaaacagggatgagaagaaaagaaataaccttcgttgttgagtgttgacttgaatttttggttatagtaaaacttattgcaagaaattaatttgtaaaaaatagttgtattcaggctattatagtaaatcttgttcaagaatctattgttttaatttatattataagtctattttagaacattatgttgatggtattaaataaatcatttttactattttcatacatttgataatattgtgttaattgtagtggatatttgaaagaatcattatataaaatagtagttttaagaaaaaaatttaaatggataacccgttggtccgaactgaaccaaaccgttcatgaacgagttgggttaggtttcaaaaaaaaatttgaaaatcgaactaaaccaaatcgatcgaatttgattagattggatcctaattttgaccaaaacctattcaaacccctaatataggaaagctttagaaatttaaaaaaaaaaaaaaaaaaaaaaccaccaaagacattatttggcgacctatatataaaagcacttcaacatgcactatcatctataacttgtgtagtttgaaatgtaattttcttgcaaatttattatactaattataattaatcaccttgactgcatgtgttttgcaaggacgaagactaggtggcagtaaaaggttgcctccacttacttttgggtggcttctagtgagtgaactctatcaatttttgttatctctctttctttctattctatagcctcttttaagttttaaaaaaataaaatttgtttaacaattagtccaatgtgttgaatgtagaataaggtatcgttccgttgaagaccttaaaccaaaatttcctcagttgaaaacttaaaaaaaatgcaggaaataaatctttcactgctcttctttttattcatttcgagagtaatttacgattatatctgtaacccagcggagcccaacttaacaatttagcttaataatgtgtattgcatgcacatatacaatatatatagataaaatttaagaaaaatattaaaaatcactagtgcaatagcatgcgttaaaaaattgtagtaaaacaatatcgttacattataatatctgctgtatagagagtgaaacagaagcagttctttttatttatttttacaatgacaacgatataatcattatcacaaacaattctttattctttaaactttgtctcatttttcaaagaaaatggattcataatgatgtatgaatactcgtatatattaaatattttatcaatatctgttttttttatcatatcatatcatatattatatctacattttcttttttctatgtccaagtgtcatctaatgttaggtcatgggtgtcatgaattattatccaaaacaaactatgatcagttggagagagaaatgttgactggctcggtgacttctttataaagagtgttcaacaatcaacatttctagactaccatctacatagaaactttgtagcttgaaatgggttttttcatgcaatctttgttacttactttgctcaccttggttgcatctatctttgttttgcagaaaagaagaagactactagtactaggtggcactaaaagcttgcccccaggtagctttgggtggcccctagtgggtgaaacctaccaatttttgttcaacaagattgaacatttccttcaagagagggttcaaaagcactcctcagagatcttccacacacacattctaggagagtcaacagtggttctttgtggccctggagcaaacaaatttgtctccaccaatgagacaaagcttgtcaaggtttcgtacatgaagactcagcgcaggttcttcaacattcctgatcaaacacatgcacctaagacaaaaccaacacaagaagctgcatctgctgctcctgtgaagatcttggggattctgaaacctgagggaatatctaggtacatggggaacaagattgaatccaccatgcaccaacatttcatgacacactgggaaggaaaaaaagaagtgaaggtgtaccctttggtgaaggcctttacccttacacttgtgtgccaattcttcttaggaattgatggaccaaaatttgccagtgagtttgagaacttgtattttgggatctattctgttcctgtgaattttccaggctccacataccataaggcactgaaggctgcagctgctataaggaaagagatccaatttctgatcaaagagaagattgacgctttgtccaaggggcaagttgtggatgacctaatagcacacgtagtcggtgctgagcagggtggaaaatatgtgccaagacttgaaataagcaacatcatcatggggttgatgaattccggccacataccaatagctattactctggctttcatgatcaaacacattggacagaggcctgatatctaccaaaaaatcttatccggtaatttaagatactaattgtatataacatgacaaaatttaaattcagcttcttagctacttttagtgcagctctctaatcagaattggagttccacgttaataacttatagtaactttttacctaaatctttatcatgcaaattgctgaggtgaaagtctaattttaatcagaaaacaataccagaaatagctaagaaactgcatctaagttttgtctgtaaaatattgtagctattttaaggtggtatgagataaaatatgattttgggtttaagccaggagagtacagtttttgtttttggcttttctttttggactcaaaatgcaagatctgaaacaaaataaggttgacataccacatagccaaatataagtggcagacacaaataaggcccaacagaattatgtatgcttaattttcctttctaaaaaaggctatatatcttgcttacttttatttgaatcagagcatgctgatattacaaaatccaaaggatccggtactgcactagattggaacagcatacagaaattgaaatacacatgggctgttgcacaagagaccatgagactctacccaactgcaccaggtgcattcagagaggcaataacagatataaactatgaaggtttcactattccaaaggggtggaaggtaccttgataaagaaagattgttaagatattaattgaaacatgtaaattaaatttgtcactaacttctttatttgcatttattttcacagatcttttgggcatttattggaacaaataagaatccaaattactttcatgaacctgaaagttttgatccctcaaggtttgaagggaatgttcctgttccatacactttgataccctttggagctggaccaagaacttgccctggaaaagactacacacggtttgtggtcctcaatttcattcacattctcataaccaagttcaagtgggaagttatacttcctgatgagaaggtttctggttcttcgatacctatcccagcagagggaattcctatacgtcttcatcactactaagttttcatgagtgcatatattgtgaagtttgaagaaaatctttgggtgtatagtttatctatcagtgcagattaaatggagaatatgatcaatatcataataaaggtgacaaatgccccaaacaattaaaatgtaaagttggttatacgattatatgtctaaatgtaatgtgatgatgataatgtaataagaatattctcaatgtattctagtcattttttagagggaaaaaaagtgatgttaagtagctattatcatttaacaataagtcatggtccatccgtacgtgcaaaatcctattaataaaagagatattcatatcaatcaatatggtcccaacccacctgaatttgatttgttattgaaagcagcgtgattagtatattcaactaataatcgaaattcattggacaacgagatactggaccacaaattcataaaccaaaagcgacaacgaacaacacgtaggataccccgaaagtcctagaccatgcatgcatgatgacaaggacgagaatgctctgacagaaagaattattcttaccactcatttggcagttagatatgataataagagtataataaattttaatcctatttaattattgtgttatatcttgtcttatatttgataacaatatggtaatgatagatgttaataatgatagtgacaatgatatagtaataactttaaggttgataatgataatgattggcattatagaaaatggtggggttgttggactgatgattgtggtgagagagagagaataattcaactattcttatctattgtattttatctattgtatatatactaaggattgacaaatcatttaatggtgtatcaaataattaattacaacaaaataggataattaacagttgtaaaaaagcataaagatatatatatactgttattatatttgtgctccctatatttattattgactaatttcttttttatattttgctcattttatactttatttgattggaccatttattataatttatatgataaaatatgttactagttcattaaattttttctaagtcggacctcaaattttttttttccatttctttataaaaagatggaaagtgatttagataacactttgaggataaaaaatggtgcatttcaaaaatagaaggacaaaaaatgaaaaaaaaatagaaaatttaaaactgaactttaaaattttagaagaaccaaaaatatgttttatcatgttttatatttcattttcatatatgtgataataaatatatttttctaaaaaacaatatattccaattgactttaagtcctaaatctgtatcttattctatcatatttttattaccaaatggaaccttaagttttggtgagtaaatatattgtgaacatgaagcatttgaaaaacatgcatccttgagtgtataacaatgtaaaattcggcatacaatcatctgtagttaagacaataaataataagatagaatgaatttaatttggatatattattatcaccgtaacaaattataaagtagtcatgattgaattaaattttaagaatattctcaatgtgttcttgtcattgtaaagaaggagaaaaaacattacattaactttagaataattaataatatatattatataagtaattatattctttttttcatttttttttcttttatctcttctttacttatcacattacttattactatatttttcagtttctctttcaaccttttcttttttacttcctatcaatctcttcttctatcccaaattcacttcaaatgcatgtatagctcgaaaggaaaattatgatgaaaaaaatgcaattaagtcgtagtccttcgtacctaatataagagtttttaatatcaattaattgttcgattaatccagacctatctgaatttaattgttactgaaagcagcgtgattagcactcaaataataattacattcattcatgaatacaccgagatactggaccacaaattcataaaccaaaagcgacaacacacaacacctaagacaacccctcaaaagtcttaggccatgcatgcatgacacaaggaccacaagcgcgtgcacacacattttgtagggtgtcataaaattatgtcttaataactttaaaacatgtaaagaagaaagaaccaagctacatttattaataactctttgtataatatgaaattaagtaatttagttattaaattatttaatattaaaattgatataatttagacatttgttgatatatatctaataatggatattgattgatattttaaataacatatctatcgcaataaaatagaacaattaaatatcaattaatttttagtttagatgaaattttataaactaaatttattttataaaatatttcaattcaatgattagattacttaatctcattctatacacgcttttttgtcaccataacattgatgtgaaatatttatcaattttgctagtgactaatatctatcaagaaacttgactaattatcattagtggagtctttttttcaaatcgcattttttaattcactaaatttgaactcaaaatcttacataagaggtatgagtcaaatatcactcgaaccaataatttgtttttaaagacgtattaagtgaatacttattattattattataaaaattatatatatatatatatatatatatatatatatatatatatactgtcatgtgacaatttttcttatgaattcatttttttcctatatttcaaattataagggtaatttataattgtgcatgtgtattatatttaaaaatgctactaaaaagttaacacttgtgaaggccatgtgtgaagggcatggatctaatcaagaagaaacgatggtccataaacactccttagcctgtgctaacgcttaggcaaagtagtgcaagaacccacgggcgtcccatctaacctcaatgaatgcttccacttggggaattatggtcagttctccgtaatgtccaattgaccaaaaaataccaaaaggaccccccacctgttgattctattcaggcacaacaattactacaccacgcccttgacaaggaaagaattcaaagatgaaaaaccatatgtattttgtggtgtaagactgaagagaaataagggatgggaaaaagtgagagagagagagagagagagagagagagagagaaatgaaagatatgaaagtaatgtgatataaatatcattgtagacaaaatttataatagagcctctgcattatattattgaatcattatacggtgaatacatgtaacatgtaacgaatggactacatgctccctaagaaaaaattccccagtgcgaaatcactggagtaaaagaagaaaaaaataatatcaacccctattctaagatatagaagggcagctgaaatggatgctgtcgaggtttcttctagtcttctgctatgttagaattctaagtaattcaaagtactgcatttgaaaccccgtaaccatcacgatgagatttttgccatctccatgcaaccttcaaactctgttgaagatcagtgtgcttagcaatccaattcaattcatgtttgatctttgtcgggtcactgtacacctcagcataatcgccaggacgacgtggaaggtagtctactttaatgtcaacccctgtggcctttttacaagcttccacaaactccttcactgaactacctgataaacataacacccgtgagaatcttgacacaactaaggtatgagctaaactattttactacaaagaaatgtacaatggtttaagaacattttccagttctattttccgtttttactttatctcttgttttcagatgttaatacagaaaacagtgaaaaaaatgttttgttgttttagggggcgtttacttgtgcttttatttcttgtcttcatttgctgttttcattgttaattataaaaaacacaccttgtttttaatctgttttcaaagatttgtacaggaaacacagaataacttttttttttatttacctcctgtacaaatctttaaaaacaggaaacagatttaaaacaagatggcaagtttggcccttcaatattttcactttttcctgtataaatatcaagaagcaggaaataagtgaaatttttttttttttttcaaaattaaacgacccctaaagtgctatattcatgatcaaagtgttttaacctaccctttccagtgccaacattgtagaacccgactttactaggttgcgccttttccagagctttcacatgagcatcaaccaggtcagttacatcaatataatctcgtacacaagttccatcagccgtcttatagtctgttcctcttacctgcaaagtggcagcacacaatgagcacacctgcaagtactacatgaaatgaatttgataaaattggacaagttcatgacataatcatctagaccatttgagcaagttgtaaataataagtataagaaataagttattattgacgctcaaagatttccatgtaccataaaattaaacgtttaagcttacaaaccatttccaggacttgtatgaccaaattcttttcagattttgtataggagcttacaaaccttttttctaccaagttttcagcataaatgaaatgcaattgcaacaacctctaacggttaaaaagccatagatgtagtattcttcaacgtgattggcaggaaacttaggactaagtcaatatcttatatgaatactaagcaaattcaaattaaatacataacagctcgagtttttcactagcaagaaaatatgaacattattctgatgttggaaaattcagttaaaaacttatattctagactaaatgtatggaaaagaaaattagaagatttatcaagagtttgatggctctgaaaaatattacgcctaagctagttgcctcatattggttcaattcctctgaaaatgcataatatatgatgcactgtaatctccttaagaagagcaatttccgatttttgtaatgaagtaatgaaatagaatgatactaggttctattgtttggtatttgaaatagaatgggatggaatggaacttgaatgaatgcatttgaatccattccatccaatactcctgtttcttaccctctaatttggggggaaggggaggtgtcatgtgggaggaactagggcttactttttcccccattccaagatatctaaagtctaaacgatgaagtgtgaactttttaagcccatttcgctccattccattctatttcacttatcattaaatatccaaacatagcctgacttctattgagaattcctttttagccataagcataaatggaatgggcatacctttaaaccaggtacaataccacgagcagcatcaaagcaggcacccgatattcgaccttgctctcgcagttcaggcctaggagcctcacccaatcttccctcagggtctgatccaatcacattgaagtatctggtggtttcccaaagaaaagttaccaataattaccagcatagataattctgaaacatcatcaacttccaatgattggctatatttcatccacagtcaaacctcaaactgtacatgaatcaattgtccaaacaacatggggtagacagttttgtaaagccaacgaatccaaatacaataatgtcgttttttctttttgattgttttccacacataaaggaacgtgtcagaagctccataatttttcccaactatgcattgattaaatggatcattttgcaaggtttccatatatttcagatatagttagaatcacttacagcttttgcaacaaagggcaaatggaataaaaataagatataaaaatctatttaaaatgaagggaaatgcaaatccaaaatacaaacctcagaatcattattgccatttcagagtttttagaaaaatcaagaataatatcttctgccatcttcttggctttcccatatggatttattgggacctgatatatagaaatagaacatcaattttaacactaaatctcctcaagcagtacagtcaaatcaggatgcaatgaaaaacaaaatattctcaaccaacccccataattcaactatccttagattcccacctgctttgtttcttctgtaatgggcatcttctcaggttccccgtatgttgcacatgtactggaatatatcaatgtcttcacatcatgtttagccatagactccaataccaacaaagtgtttgatgtaatattgtgataatacctggcaaacatgcgaattagaaataaattaaatctataaagtaaaaccaaagttgatcaatccaacactaaataatcattctcataacaacaatttgttcaactctcaacaaaatcatatctaattacaaagaatggcaatagcaatagcataatgcaattcatagagtagcaattgcaaatataggtacactcaaaccaaaaatatcctctagataaagatgattttcaaatggtccaacttttctgttattagtctggtatgcattgtaaacattatgtcaataagaacaactatggtttgtctttgaagttcttatccataatattgaacagtaaatagaaaaatatattatcttgcatcacagtttgtgggactcaatgcgtgacttaattggcaaagccaagaccataatagaaatctctgtgccagttcaaataatgtttaaaatgtcaatgtgtatctaaaagaaaatgtgatttgtggtactaagatatagatggtgaaaattagaaactgaacacaagtgccacttccacaactttttcagctgagataaatgtgacgaacaaaatctagaagtgttagaaactgaacataagtgccacttccacaactttttcagctgagataaatgtgacaaacaaaatctagaagtgcttacttaagaggatcaacagtgctttctcccacatatgcaacagcagcgaagtgcatcacggcatcaaatttgttctccaaaaatattttattaacctgataaccagtcgaataaactatctttcaatggccttccccatatatgccattaaaataataaaaaaagaagtgacaccaaagtatttcttgtaacaaagtgtgtaagcatacagatattggatctcccaagtcagcataaataaattgaagccttccaggttctggaaataagtcttgaagaaccttgatggcccccaaatttcctcgtgacagattgtcctgccagaaaaaaaaatgttatgtatgtagcaaccacactgatcagtgcatttagctttaacagaatcatctttatgaattgacatactactatggtgacacgataattctccttcagaagtcgtagagtagcatgtgaaccaatatatcctgcaccccctgttactaaaacatgagtgactccaggttcgtgaactgcaaactgaaaaaggggggagaaacagaaggaaaaaaacgaattagaaatagctagatgaataaaagagaaaacagtacagttgacttattacgcaaaaagattgagcgagagaaagaagagaattataactgaaaaccactatgcagtaggtctcgcaaatttcaatggcctaataaatgtctccagtctctttgatgaacacacaaattcacaatgaaataaaatatgaaagattatagctgtcaagcgaaaacattgtattcatgtgtaacaggatttatacctaaatctcccaagtctaattgttaggtacaaatgtattataacatcaactacaataaacaatataatctaatctacagatacacgtcatacaacaaacataacacatgcactaacatatgtaggttgaccatggtaatggtgtatggcattttaattgtatcaatggtatagggattaccggactaggggaattcaaagatggagaccgcttgatcatgattatgcatagtgttgttaataccgcagcaagaaatactttcccaacaaaattccccttcctttttggatctgcataatccatgcctaaaggacagaaaaacagaaactacattttaatacaccaattacatgataagtgggggggaaataacaacaaacacaaaacaaattacaggacattgacaattaatgaattcaccaacaccttatgttgtcaattcatatatctgcacccagtctatcctatagtcaagtgttaaaaaaagtaaagttttccaataatctaatcccattttcaaattgattaatactttaagcaaccaaacttcattcaaaggagaaaaaaaataagaaagttgatcatactaccattcatgatcaaattttaggacagaataatacctcccattgttgtagctctggctgcccttgactgatttctggacctgccaaaatttagcatttgcaaaatccttattgtttagtgtgttgaatgagatcttattccttaataccaacaatcaaattaagcttcactccccagacagatcttgagagacatcctgcagttaaaatcacaccacatgagatattttctcctctaaaatgtgaaacaacccaaagaagtcaaaaatgaaaagccaccaaacaaaaaatttaaaaaacaagcaaagggttgaccccagaaaacacagtaaagtaaaataattaaaaaggataaacattaaagcaaaaatagcaaaaaggaagggggcaaattaagccaatgaaaaaacatagaattcaaataaccacaacattttagccaaatgaaattaagccactgcaattcacaaataaattcaaaactgaaatatggtcaaccatagagaagacatcaagaattccaagatccacattaaacagtacaagaacgaaccaataaaaaatttaaaacacacacacaaagctaaaagttaggctctgcataactcattattcatgacactaacaaaagacatgcaaaccaaatcgtttctcagagcatgaaacgcgaataaggaaacaggggaaaaaacgaaccccccaagaggaccacattcccatttaacaactcaatgaaaaaaagctgcaaattttgaacaaacccagaagactccacagttttaagatccaacacatgacaaaagcgaacaaaaacccatcattaaccgtttcagctcaaccacacttcaaaacaacccaacatatagtaattctggagcacacaaaattcccagaaaacaaaaacgaattattctaagcttaaataacaaaaacgaagtccttcatcagaaccagacccaaagccgcaatcataattacctcaaaggaaaaacaatgaaaaaaataaagacacgagctttcacagttacccacaagatcttaatagaaaaagagagagagaaatttgcagagctgcaaagaagaggagaaaaatgtgtaccagaagagaagacggtggagagaataatggaaaatggaaagatgtagaaaatggaaagagagttgcacacgaatattgaagggtccaaaattgaaggatagtcctgagagccttgaatatggatgaagagagagagagagagatagagaaagagaagagagagagtggcggagagttctgtgcgtgcagtccatgtggtcgaaacgttagagggagagagaagagagagtgacccgaccctgtatcaaaggaacaacaaatcataggacttcttttttgtttttgtttttttcttaatttctttaagtatatttgtttttaaattaatagagtttaattgtagaaattttacaggtaattaattaattaaaatttacgctaagtatgatttgtaagataattagtagtataataaatttgttatacataatagaaaactattagaattggttaaaaagtgaaggtttcttaattggtaaaaatcaaacagaaattatctataataacttaaacataagtttaactaattgaattatatccgttaaatcttagttaatagtgaagggtttgagtattaatataaacctatgtttgatcatcattgtgtagaaaatgtgattggatcatttatattgatcatatataagttacttactctttcaaaagtttttaattttaatattatttgtatagaaactttcattaaaaaactaagtgataattattttatatataattttttaaaataaatatataaaataatgtataattaagtgttattcaattcaggttggtctgatcggttgaatcagaatttagttgtttaattaaattgatcatacaattgatccaagataactagactaaatccaactatgtaggtccttggatcatatttgaacaaatctgatttggttaatttttttatttcaaattaaaattttgaattttttttaaaaaaattaattttagattattattaatttgtattttagatcttaaaatatcaataaatttttctactcaaataatattaatcatatacttatttataatatatacatataattttaaatttttaatatataagatcaaattaattcttttgatttattagcttaattgaatcaattatagaatttcacaaaaactcgaaattgcaacagctttttgagcatccaattatgtggtagcacttgttgcgtactatctgcatggcatcatatcatcatcattcatatgggacattgtttttctactttgggacctacgtgtcccatgaaactcaactttctataaccaccggtttctttccattgcatcgcccatctttgttcatttcagattaatcaatgattaatgatgatatattaatgtttatgactattcttcaaatataatgtttgcttttttgttaacttttgtattgattatgttagttattactatgttgattatggtatgacaaatgctaataaatgcattcaatgcgttaattaagaaatttaaaataaattatttttattaaaataaaaattatattatttatatttttttatattttctataatttacacaataaatatttttttaaaaaatttaaactaatatcttaaagatattcattaacaaatcccttatggtattagtatctctgttaaatgaacctctacggggaaaaaaacttgtccacggaagtttggacgaagaaagatatctgtacatcaaagaaaatttacagcctaactgaaggtgaaattttttggtagtaaccatggagttttagattagaattttaatgatgattataacatatatatatatatatatatatatgtgtgtgtgtgtgttgtttttcttcctgtttgtttgtacttcaacgtttgttccattcccacaaacatttatttgaaagattagttaataaaattaacgagattctacaaaaggaaagatcaatgggattaatgagaaatgtggactttatattactatttttttacgggaactttatattactactgtatagacatataaagcgaaataaattaacatataaacgattttgttatttttctccgatttaagtaaacaataaggtgtggcttataatttttaaagtatcctctttgaaaaaaaataaagtatcccacgtgcaaggcacattcaaattttttaatctttactttattttctggacagctaaaagtatcacgctttcccaccttttttcaaattcatgtgcaaaaaataacacatggccaattaatttacagagttttttattttaacaaaactgatgcagaatatatatatatatatatatatatatatatatatatgacagatacagacttcttatataattgctactggttcattaattactccaaaacataggatgggaatttttgtgtgccattggtcccccaccgtccaatctgtgatggatctcttcatcctatattcatattagattattagtacttttttttgtggtcggttacaaacttacactttctccacctccttcttatatgttaagtattcacttattagtaatcttctaatcaagtatcctttacttcaaaaaaagttaaagaaaatttaatattatcacaagaaggttggtgcctcattctcaatcatatgaaactaaagtacctttcaagttgtcaagttttgacagtcaattttttctcacaggaatctaaaatggtattaaaaaatttataacactcgtatattctatttattcaactaaactaaattcctttgatgttttgcaagcaagtgaagtgaaatagtcacgcataaatgattttgatataatttttgttaaatccaacctcgctcatgtaaaaacaatattaggtgattctgattatttattttagaccacttaataatacatgataaactattaaaataagctcgtatcaaataaaatttatttgatcaaattattttgtaaattagtcaaataaacttataaattttctgaatgttgtcgtaccaaatacatcctttttgtgacagtaaaacatccttcgtaatagatggcattttattgcacaaggaagaagtttagttgtacaacttgcattgttgacatcatcatgaacttgggtaaatagtcaactatatggagaaaacattagatgaaacgctacgtggtgctttccttgtcaaattaggtggactttgaatttttaatatcaagctttccaccaaacacggtgtgaaattcaaaagcacagagagaccaattaagagaaccgtgtgtagttaagagacaactcactttgccccacatgcatgttttttttgcctttgaacctactttactttaatatgcatactgtgagttgaatccgtcggatcaactttcccaactctcactttttttttttttgggttagattgtatattagtccatatgtatcaacattaattattttttagcataattgatctattagcttagttgattggagtaaagggcggatccacaaaaataattaaggaagggcattagtgatgggagtttggggacagtgctttcgattttttttttgtaaagaatatttaaaggaacaaattattataaatcataatataaaagaacaaacaaatagtcagatcaaattactattttggattgaatagaataataaaaacaatcgatcaaattgtttttactagatacaaaactttaatatagtttctttttttaataaaaagatagaattaaaaatttcgcctttatgttttatggtgatcttttatccaaatctttattatacatattaataaggcaaaactccaattctgattgaaaaatactgccatgttgcttttgattttagtaaattcaaataaaaagggcatgaactttgcttgatgattcagggtccaagaatttcagatgcaaatcccgaactcttcaagtacttcattagggcactttgcaatgccaatacttcaaaggattactgcccaacagagacatgtccattccagaagtgtatttgggcatgcgcttcctacaccattctccattactcatacaccatttttacacagtgcaattcccattatatccttttaattttaaaatcatttatataattttttttaaacctttcttcctccctctcacccgcaacgtttcttcttcatttttgctgagcgccttcctccctctccggcaagcaccgcattggcttccttcttcttcccgttgaacgacactggtgagtgattgttgtgcgccttcatctccggcaagcaccgcaccgcattttgccgttcactcctgttcacaccgcattttaaaatcattttgccgttgaacgactctagtgagtgatttctttcgcaattcgtgcaaatggtggtgtttggagggtgttgcaggtcgttaatggcggaatcggatccggtaatccgttggggactatcgtacggattgggtgatccgtatgcctcaaatggattgggtgatccgtatgactcatacggattgggtgatccgtatgagtcatacggatcacccaatccgtatgagtcatacggatcacccaatccgtatgagtcatacggatcacccaatccgtatgagtcatacggatcacccaatccgtacgatagatacggattgggtgatccgtatgcctcatacggattgggtgatccgtatgagtcagttttatgcttttaaacttgaaatttttagaattaaatgaataatattgatgtatttttggaatgtatgtgcctgtgggtgaaaatatgtagtttattgagttgattcgattaaaaaaggaccatgcttgtgaatgccgcttgttcaaaagatttataggttattttgatgagaattgaagttgtttatatggtccagtgtgcaaggcaggtgcagaacccataaatagtttggttttgattacaattagacttgagtatttggtgtgcttgtgaagtgttgttttgaaatcgttattggttggtttgcgttagtattggagtttgtttggtatgcttgtgtagcgttgttttgaaatcattagtggttggttttgattaggattggagttgattaattggtaaggtggtgagttgcagttgttgaacccattgtaggttggtttgcattagtgttggacttcgttgtttggtatgcttgtgtagcgttgttttgaaatcattattggttggttttgattaagtttggagttgagtatatggtaaggttgtgaattacagttgttgatatggttgtgaattggacgtcttaattggacttcattatttggtatggttgtcaatgacactagtattcattgatgttgttgaaccaatttttaaaaagctggaaaatactgtggatgcagattatggctaggacaagaggaggaggagtgcgtcggccttttggtcgaagtcccgatcgtcctgaagaagcccctgagcggcgtaggcctaccgcatctgtccgtcgtcagagggcaggtgttgctattcatgatgatcatcctatgcctgagcctgagcctcatgtggatattgctgacccggtgatcgacgatatggacacagcttctgaatcttttcccggaggtccggaagattcttcggtgcttaccgagtttgccgaccatgtggctctacgagtctgggcaggagaggtatgttcatgttcaactacatagtccaatgtgaaagtcatttggttacacaataatgatttacgttaaatgatgtcttcaatgcaggaacgtccagagttgaagcttgcttcccatggccgtaaggtcattagatttgggaagcctgtaccggagattgaaggttttgtcgcagctactgggctgactccattgattggatgctcagtggagactggagacagggggttgctatccgcgtttgttgagcgatggcaccccgagacatgttcatttcatctgcccgtgggagagatgacactgaccttggacgacgtgtcatcactactgcatctccctgttatgggcacattcgacacgtacgagcagttagacatcagagacgcgatcaggttgttggtagagctgctcgatgtgggtgtacaggaggcatccgctgagacgacacagtgtcacggtgcttatgttaggctatcatggctccgggatttgtattatgcgaaggtggagtcgagacagtggatactagccgctagggcatatctacttcaccttgttggatgcacgttgtttgccaacaagagtgccacacatatagctgtggcattcttagaggctttcagagactttgatcgggctgcaggtcttgcatggggtgttggtgcccttgtccacatgtatgagaacctgagctacgcatgtaagcatcacgggaaacatcttgcaggctacatctctctattacaagtaatgtccttgtatgatgtctgtaattatcacagtttattggttgcagatgtgttgtttgcattgtttcctgacttgtattgttttaaatttgtagtgctggatatacgagtattttcctagtataggaaatgaggttgcagatgagcaatacgaggagagggaacctcgtgcttgcaggtggaagagcgcgaaggccttaccggtgtcaacctatcgtaaacgtatagataggttgacaccgtctgatgtatgctggacaccatatggggagcaccgtgcccaccgggagtttgaggtcatctccatgtattctggattcctcagatggggtcctcatctgactaggtacttaccggagagggtggtcaggcagtttgggtatgttcaacagattccacccctgccatcctcagatgttccttccagtgaagaagtagatgatacgtggacccacttcatggaccacctgctgcccaccggagagttggttgattatgcaggtcagtgtggtgctgcatacatggggtggttcttccgcatttcccatccattcatgaccccatcccggtatgaggaggcttatgcccagattccgccagtgtctcagcctgcaccctcccatcctgcaccagcccagacctcccatcctgcaccagcccagacccagtcccatggtgatgtcgatgagcagagaccagtacatgccgtggtaagacttgtttaaattgttcatttcaaattgaattaacatttattgacaattgtttatttttagcatgtgtgccaacgtgctgctgagggcctccaacatatgcttgacatgaggatggttacagaaggcacagatgcatactccatggtagagcaaatcctgcatcaccttcgaggtgtgactgacgatcgcattgtgtacacccgagctagacggactgtcagaccgcggaggaggccttccggtgctcgtgattgacatttatactgagtgaattttgttatttgacatgacagaaaccatgtaattattgtgtagttacttataacagcaatgtatgcaacatatttttaatatacttcgcattatatatcattgaagtcatacatttgcattgttaaaccagtgtttatacatctcctaaatcaacatattccgtgggcaaccgcatcgatttaatatacaaccgcattcgatcaatgtaattatacggccactgtcgagcttcctgggtacaatgactatcccacaaacatgccgtcaagggtaaaggacaattgtctgccaaagtaacctgatttaaacaaattgccatataaatcattaatctatcttgaaaataaattcgacatatgaaaatgaaacacgttatgtcttacctgaacaaaatggtttccaaaaacatgaccaatgcacaaaattcgatgaactcggggatctctaggcggttgacttcttagagggaagaacgtcatactttgctgcagtgacagggatactacaatcatgttatatcttgatgcaattacatgacccatatctgtgatatccatccacttatccattgtgacctacaaattatcagttaatcgaatatattatatgcatgtttgtacagagttacgttaccccaattcatgtgaaacaaaaacaatttaatcataccttcgacattccatcaactagtagggaccgcttgatcttctcaaacctatctataccaccaaacaacaacacatattgatcagtccattgtgcaagttctttcagcagatcattgcggaccaaagaccaagcgtcttcaccgtaacctataaaggcagcaattactcgatatccacaattaccatcaggttttacatcagttatgtcaacaataaatttctgcatgaatgggtcaaattgattgagcattggaaccctccggtttttcattagaacatcggaagaggaactggactgtttcggggtagaacagctattttgtacagagtgtaactcatccacatactcgaagtaagacgggtcccttcttgtagaccgttcgtgctttctgacattcttcttctgagcaccttttgttttgaccttatcagggggaggacacatggaattcttatcagggtatgcaatctcagacagctttgtctttagtgccatttttccacacaaatcaagtatctcaaaacggttagatatgacatctatctcatccgttatgcttagcgtgtattcagctgcaccattgtcccaatagttcaatgtccgccaaaacatatgaacactggtaattggaatgctcccaataacatactttgccagctcacatgcacaaggcaaaccatacgtcgttctcaacacacatccacaacgagatgggttttttccagcataattcacccgctcatactcttcggcaatttgattcaacgcatgcttggacaccatgccaattagtttcctgtataacgtcactttaaaaacatgtccaaccacatgtgtagttctttccaaagatgccttgatttcagtatgttgcaaggtgatcatattgttcatcgcatcccaaaccgtgcacaaatcaccaacactattttgtagtagccgctttaaagtccaatgggcagactcaaccctgcaaggtatgatatgaagatagttcatttcatattttttaaacgtatgcaaatgatgatataaatgataaattacctaatgtcttaagtgaaatttacctgtttgttgttgtatttccaaaatgcatgactttatttgtccatgctgtgacaaatttttctttgtgagggttcaaccaagtgtccttcacgtaatcaataaatgttggccacggagcacatgcaacctcaaatttcataagacaatcatcaaatttcttctcattagcacagtcaacaacacttccccatgcatccatcacataatcccacgcattctgctgccgaatataagttttacatttagccttcacattcttatcaatgtgaaacctacacaataaatttgttgcctctgggaatacggtttcaactgcactcatgactgctaaatctctatctgtaacaatcaccttagggaaaaattcacttttaagaaaaattcctctaaaccgttgaagggcccacacaacattacttatacgttccgcctctaaataggcaaatgcagctgagaatgtcatcccagtaggcgtcacaccaacaatgtcaagcaaaggaagcctgtacctgtttgttttataggtactatctatgaggaacaccatatgatatgcattactcagctttaccgcatctggatgtgcccaaaacaagtcacgaacaacatttacatccttcaatctatgccaatgaatatacatgtcacgttcaagaagtttcattagctgttgcatttcagtgttttcgcctcttatacgcgtgcggtatgcatatcttgcattgtatacttgcttcaaacttgtgacattatttgcattgtgctccttcaaagttaacagaatattctttggtttcaccattgaccttgtcatatctgcaacaatcatcttctcctcttcagttaatcgaccagcgtatgggtgtccacagaatgacttagccaaagcatggttgtgattaccacatattagtttcaccatccacccttgacctcccgaaattggtttaccccgcagcttaaaaggacactcgcattttctagtcccagtggtcaaacgtgtcaaaccttttttccattgtctatattttccactcctttcacaaccaattaacacaaatgacgtccttcctacttttccggtttttgtgtcactcctcattataacagccacaaaaccattctcaaatgcaaccccacgagcccatttcaataccgcatcacgagattcaaacacctacacaaatgagtaattcatctttaatcttctcaatttaatcatttaacaactttaactacattcaaaagcacataaatacctcagtcgtgttgaatgctgcagaacaatcaactacacaatcattgtcttcaaacgcatcagggtccgcttcgatgtcttcatccatataattttcttccgacaacatactttcatatatccactcatcggtgtccatccttacaactacacattttattttatcattactaaaatcacatacaaataaatcaccatttacataactaatccataaaataacatttttacaattattcattaacgtcttaataatcatctacatacataaacaatccacaaatttcaaatatgcattactcactcaaataattttataaattaaactcaattgttattgaatccaaaaactaactttccgtattaattctctcaaataattatcagctaaggtaaattttccttaaaaatatatgttttaaccaattttttaaaaaaaatttctcaaacagcagatttaataccatacggattacccaatccgtatgggatttacggattacgtaatccgtatgattcatacggattaggtaatccgtaaatcccatacggattgggtaatccgtatgggttttacggattacccaatccgtatgggatttacggattacctaatccgtatgaatcatacggattacgtaatccgtaaatcccatacggattactcaatccgtatgacacacgaaaacaataaccaccaacctctgcaaccccgacgccacttcgcgactccgacggccaccaccacgccaaaactccgacgaaatcaacagaatgccaccgagaacaaccaatgaacagcgtttgtagcaacaaaaatggcaccaaaatgaagtgaataaagggagaaaagaagaaagctgcaacgtaactgtacatgccataaatataagaggaatataagaggaaagctgccaggggtatttttgggttttcaaaactataatggtgtagaagaaattgagaatggtgtaggaagctggtgccgtgtatttgccttatggaaagctaggctcacctaatatgggccaacaccctaataaccgcaaaatattagcattttttgctggtggagcccatggtaagattcggaaaaaactacacaagcgttggaaaaacaaagataaagtattgcaagttcacgaggaccttccaaagggtcaagactacacaaagttgatgagcctaagcaagttctgcttgtgccccagtggatacttgaaaatttaagggaaacgtaggtttgcttctaattggagcatcgtgttaataatgtgaaggtcgtacgtcattattttgtaaaatatattttaacttaacaaaaaaaaaacttatggattgcaccatccgtaaaaaaaaaagcctcttacagattacggactaggcaatccataaacaaaaaaaaaaaactcatagcaattggcgaattcgtaaggttacgaaatccgtaaccttaataatgtaaaggatatttttgaaagtacacttttcatgttaggtgtattaaaaaaatgcctcatgttggaagcatacgccatgcaattataccaaaaacttacactccttcgcagaggtaagaagcacgaaaattccaagacaacaaccccaacactttcctttggtcaggcaacaacatacacgggggatggtaaacattccatcaattacaacttctcacatcgccactccaataaatttatcccaaatcaacaattaatttgatgaaccaacagcaaaatcaacataaaatagaataaaataaagtgtcaagagcacagcataatctcagtcgagggcaattaaaaaggtcatttccataaaccaaatgtactcaatcaagaaatcaaacaccgttaagattaccacatgaagccgcaacttcctccactcatactaattcaggcttcagagtggatagcccaacgaagttttacagcaaataattatgagcttaggaaaattacgtggcccatggaggtaataattttcagaaaattatattaatcaggaaatgtacaagtaagaaatgattagctagactgtagggccctttttgggtctcaaactgcactcacgacatttcttgcagctggcagatagagagaaatgtataagtgagaaatggttaaaattttgtgagcaaaggaagcaaactcaccgattcaaggagggtcgaagggagctttgggggaagaatatgggagactattacaggtgaaagaatgagaaaggaaaagatggaggggttctattagaagttaggccctcagaaatttacaatagcagcctccattttacttaccgaaacactattaagtttttaaaatttctacaagcttcctaatggatatttaatggcaacgaatcagagctcgtgcaatctgtaaagtcaatattaaatacagattgcaacttgttttttaaaacaaatgaagattaaagtctagtttaaataaactgggatgcaaacacaggtaaaatcaatcaatccttttacaagttaaaatcaagatatatatatttttcaacttttgagaaaattgattttacttctaaattttcctttcctataacttgttgaaaagttcatccaaattcagcctgactttatctgacaagttgcacacaaaagatggcgattaatggaaaatctttgctaaacctgttgccatggaatatatctttcaagacatggataaaactacacatttttgtcatgcaatttcgaatactttgttcatgatacggttgtttcacccttctcatcttccaatagctttaactccctacgccaatcttctaattttgctagcttttccaactgctctggcttcagattttgctctgtacttttctgctccaatgcttctgtaagtcgaatctgaatttaacagtcaaaatattaggctaggaaaatatgaaaacactatttgagatagttctttagcaagaccgagaataaaaacacatccaccatgtcatgcattcaaattctctagacaatggccaaaacaattttacctttaattattgaactaagttgcttagcctatcatagtattatactttctaattctaatattcatttctctaatcacaatcattttgtttataaagcctccaattcgctctgacacaatctccttggtaaagttgatataattatttgatgttcagtacatttgtcattaataaggacacacacacatttgtttaatgagacaagtcatgcaaagtccccagtgcttcccagaaggattgcgttgatgtggatccatgttctgagaattcttcaactagactagctaaaatattagccacataaaatcataaacctactagattttataatggtaacaacatatggaaaattggaaacatatccaatgctccaaaagaacaaacagattccaaagaattcattaggaacaacaatacaacattcacttttccagcaacctacctatagcaatattttctcctgaaccacaccatcaactacaaaattgaatatctcctatatgtcttgatcaagattcatctcagtatcatactgcaacttacaacaagagagatgatagcaaggatccatccttatggtcaaaaaaccgaagctacctaaaaatgggactagtgaaacctttgcatcactaacattgtatttggtagagaaagaaatgaaagggaggggagggattttgataaaaatccttgtttgattcaaaggtttggaagggagaggagagaaaatgagtgggcaaaagtccctcccctccactatttgcctcccatttccttctcctcttttaaactaaacggtcaatattctgtaagttgtattagatcttgagtagcataagtaatacaggatgatgagaagtcatgaaccgtaatggtggtaactaagaaggggccattgatgagtcactatttatcactatttactcatctttctgtactcattttaatccctgaattgtgtttaatcgttcacatttgcactatttctcatataggatttaattggaccgataattcagattttaattaatttggattattttaagtttaattattccaatttgattttcagggcagtttaataattaattgggcttggaattaattcatggacttgaagattgggatgccacgtcagcattattttcagagcattttattttcgttttattttattttattttattttcgtttttgggccaaaattgttaggaaaagcccattttcgtttaggtccgccactctatatatttgggaaactgtgcccatgcagaccagccaacattattttcgttcagttctcctttagggttttagtaaatttcgttctctgcagttttctttgtttctagggtttatgttccctgtttgaattttcggttcagaatacgttgtcgttcagtttcagtattgttttcgttttctgcttcatcttctcaatttcgaatttcgtttctctgttttcagtttcgttttctgctatttcgtttctgttcaattttgtttctgcttttaatttcgttctgcttttaatttcgtttaatgtttcatttcgattcaattcgtgtttctgttgttatttctgaattaatggaaggctaaacctagggttggaccctaggacagattgcaaaccctttaatggaggttctctgtttttgaatttcgtttctgcttggttcgttcttgttggggtttctgttctgtatttttcgaattagagtcatgcttaatgattctgatattgattgattcagtaatctcagtttgcttaattctgagagcttgccctaacgaggttcacgtttgcttaattcgtgtaatgaagttttaggttaatcttcgcttagttgattaatctggactgataaggattaagtagaacagattatctttcgtgaaccaaggaaattagaggcgcaatatgttataagggtctgacttgtttctaatcactgcaattaattgttatttctgtttaatttagattttcgcattctgccaaaaacccccccaatacacgtttcaatccctaacgcagacaattgagatccttgagagacgacctaggagtcacttcctagtactacatttaaaccgtattaatttggccgagtacgacctcgatcagccatgaatatcatgaataatggtaaactgttataggaattacaaacaacccattgatgcaccatagtaattaataagattcccttgtaatcccttgttgacataatttttccacaattttcagcttctttttggccaaaaatagccttgtaggatcattagtatatggagagcttttctcattgtcatttacatccgagaaacaagtaaagttccttcttatatttgagtgttctttcttatatatcttgagtctgccgagccaaaaagatttaaaagttcatggaacaacattacttgaatatcttctttccttcattttttaacggatattaagaacattaatagaaagaaaggagagataagggatcatataaaaaaggaaaatgtaaacagaaagctgcagaggctacaaaatgcagcaaaactcatcttttattcaataaataaaagagatagagagagagagcaaggtagctctccaatctagcagcatattggttataaattccctcgagacagaagtgaatagcagacacaaaacaaatcctatcacataaggtaatcagacacccttgaaaatatgggcaaaccatgccaacctatacccatgaaattaagtctaatactcctcatggctcatacataaacaatactagatagacagcagcaccataacctatgaagcacaacccaaacactagatatgacatggagacaaaatacaggacaacagacacacataacagtttccactgtaccattctcttccaattttgtttctatacattaagcaataaaggcaaaatacaaatttatacaattttaaactgccaaagatgaaattgcctgaccctgcgcttatatcagaattctagaggatccaattcccactatgacaagcacatatcacatcaatcataaatttaaatatttgttttagtaaaattcttaactctactatttcatgttgcaacaagaaacatgttaagaaccttcattttcttcgcaataaataattgagggacacattagcaggataagtcacagcacattgaatcaccaaggaactaaagggcagggatgcttgctacatttttaggacatttttgccaaatggaaatctttgttcatcttacaccatttaagaaaaaggaattgcctgagagataaagagaaattgagtgtgtcaatgtgataagaaccttgagagaaccacaccacaaaagctagctattgtagttggagagcccaaggccttataaaccccacactagaatcccatacttccaatgtgggactccaagtcccataccttgcaattggaccctaacatcccaccacgctccgtagctctggcgcccacgcgggctggctgtgcactagccctttcattagtcctgagcgaacattgcaatgtcggtgtcaccatccgcgccgcttgtttgcaactggaagtcatggtggaaggctctgataccaattgataagaaccttgagagaaccacaccacaaaagttaactattgtagttggagagcccaaggccttacaaacccgacactaaaatcccatacttccaatgtgggattccaagtctcataccttgcaattggatcctaacacaatgctgctcaaatatgcaagagacatgggaaaaaaaaaaaaaaaaactgaaatcttaagaaatatgaataaaagatcgaactaacatacatgacgtggtatgattggcaaataactacatttgtagaattcttaggtctgtgtgtgagtctgatcggggagataattttccaatgtaaacacatgaaattaatatctctcacgaaaggcataatattgttaaagagtggggcgtcaacagaaaagggtatgaatcatcaaagcataaacggtgcaccttctttttgagagctcgaattcttttatcaatatcttgagcttgggaatcttgcacagcgagctcatttacttgcgaggtcaatgcctccacagattcctgcttcccactctcttcgacttcactcacattcttttccttttcaagcgcagcctgaaataacacatattatataattcgcattgatcaaaatttatcaattaaacaaagtaaagtagaacactaattttatatatatcagcatcggcattagcatacatacctgaatgcgcttttccttctttctctcgttcctcttgacggacttggtcttgggcttggaatcggcgtcggggtcgtacccgggaggcccagccgagcccatctcctttttcaactgcagagaacaagagtgagagaaagagaaatggaataataagaataagaagaagaaattagggaacggacgagtgctcctttgggttggtaaatggcgacttcgtcttgaggggtgtagccggcgcggattcgaatgggcttgcggagggttccgtcgggccgtctcgttgggcccacgatcctctctccttctttcaggcttttgctcagctccgctatttgcttcttcctttcctcgtcgctcatctttcttccttttcaactattactactcttcttcttgctatatgcttatgctgcgtctctctctctctctctcactattgacttaagcacttaaacaaaattacttctactaccaatcaataaaagacaccttctcttggacttggactctctcatgattaattatcataaaattgattttgattgaagtaaaaattacttttatttatttcaattttatcataatttttatacatcataattaattttatgataattataaaataatttaaatatataaaatttgcttaaaactaaaattgattcattttatgattgttcaagctatccaacgcacacttattctgtgcgggtccccttcttacacaccgtgaccaaatatgctttacccttgtgtaataaccaaatggagtcactattttattaaaattgcaaactagtccctatataagtaatattcgttatactagttattttatttgattcctcattcctgtaacttttttattttaaagttttaatatctgtacgagaaaacaatatcttcgattatctgtgtaattttttttaacaccagtcattaacttttgtaataatttttttaaaggaaatgaataaagaactcatcaccaagatctaaaaattaaccgttacgtacatatacatagactaaaaattacaactttctcttataaagactataatttagtgttgaaatttcacataatgtattatgggattaaaataatatatataagtaaaagagattttttattataagaattaacttttagaacttatctaagtcataatttaaattcaaagaccatattaaaatttattataataattattgttggacctattaaagacggatcctaggtaggagtgataaatgggtgagatccccaagaacgcacagaaaagaaggattccaaaaaataaattaaaaaatacatatagttatattgtgattttttaatgttattttgtattagttttataaacaaattaaaaatattttttatcacctattttttcatatctgaattaaagtatagcatgtgattataaagtattaatattttagttgttagtttttttcaatgttatgtctataagtttatatatgttaaatgaatttttatcttagtgtaacatgtcaacaattcaaatgtaatggagatataataatatattgaaatgaagtgtttgatttatcaaaagggaaaaaaaaacacaaactataactcaaattataaaagagtctatttttatactataaattaaaatcccaaatttggataataaaactttaactctcctagccttactatctcaactagaaatttgtagcactttctttcctccatgcaagttcatttcccacacattctctataattggacaaaaaacatctcaattaataatctcaatttactctctatttatgcttttttttaaattatattaagtttcttaatcatctactcgttccaatttaaaaataaaattatgccacaatttaaagtatttattatgaatctaccatttaatttatattttaacaaatatttattatgaattataatcataataataattatataaaaataattatttatctgatgtaacacacaaactaaaatactagttaaaatttaaaataagtaaattaataaattaacataaaaagtgcatgtaagtttaatatgagacaatgatatttttgccaatgactagagatagcaaggagtaaattgaatgattaatgtaattcatcatatttaaatttgttaaaatgttgttattcacttaattaataaaatacataatttttaattaaattatatgccctgctttttagtatgatttatgtttatattttaaaatacttatatataagatcttattttattatttcatcccatgctcataaaatatcaagaccgatcttggatctattgaatcacccatgattagattttattattatcagactatttgtaaatatccaatcttacaaattgcttacttacatttaaaaaaaaaaaactgcatacttaaaatatctgatcctctggaataaataaataaataaataatgtctactcctcaacatgaaaatggattgttagagatttgactccacattatcggttgatataactaaaaactctccgtcatcacttctagatttattacgatgaagtcctgatgttcttgaatgtaattctttttttcttttacttgctagacatgagctaatatgcgttgattatttagtgattgctgatatagagctgcactagaggtttaacttataatctatgagatacttctagctattacttacgaaccttatgatggcattttcttcacaagctcagtacttagctaaggggcaggacaggaattaagttttaaaaaggtgtatataaagtatttgaaatgttatgaagacattaaatgttagtacctctttcaatggatcggggattcaaacggttgattatctatgaggtttgtgaaattatataaacatttttttgttttttttttaactattacaagaatcttttttgtaagggatgttaatataatatataaagagtgttagtgtaatgtttatgaacattgagatatagagtgataataatgtaatgttttaaatataaaatgaggttagtatagaaataaagaaaattaaaagagtgatattatatgtaatttgaaagaaaaaaaaaactcacaaaatacaagtgtattgtgttgtgctctttgatataatatgaaacaggttatgtctaagtacatcttaatttttatgtttaccttcttgttctaacagttattattttccctccccttaactttttttctccctaaagtgtgtacatcccaagaggtattttcttagtttttgagcatagctttcttttagcattaaaaaaaaaaacaattaggctttctcatggaaagggagtaactataattgataataaactattcttgatcatacaaaagcagcccaataccccatctccaaacgagcttaatggaaaaagaaacgataataaccatccgaagttgattcattctctcataataattttatatccattactgatgatattgattagtagtgctatatgactcacaaaatataactatatttaaaggaagatgttggatggatgcatagctaaggatgttgatggtatgatttgattcaatttaaatataatattaaatctgaatcaatcttcaaagatttagtttgattttattttattttacaattttttcatttattatcatataatttatttttaattatttttaaaaaaattattcttttattaaattttgtttgacatattttagttataaattatttttcttttattttctctcatactaaacaatctaaagattttctcactttttttttctttttcttacttttataaaactaaacaaaaaatcatctttcttacttttcattttctctcgtaccaaataatctaaagatcatctcatattttatttttctttcttttcactttcttccataaaactaaccaaagcataaggggaaagaaaagacaagaataatgatcatttgacaccatgccgcacctctttttggaaggtaggggagggagtgcaaatataattgaaccttttgcaaataactaagagcatcttcaactagagtgcttccaagttccttcacttgaaggaatcgttccttaaatttttttttgcgttggagttggcttgcgtggcagaatcgtatcatcaagaatgaaacgcggtccttatataaggaactgaaacttatgaataaaataatattatcgatatcaactacctgtaaaaaaacagaggaaaaataacaaacctgaggtcgagcgcatgaaggaagaggctgcgacagtggtctacatcaaaagaggcagtgcacatggaggaagaggttggtgcgccgcgcgaggtggaggcggcacgaaggaagaggtcgtgcacagaggaagttgccgcccaagtaagccgtcgcgtaaggaagaaggcgcgtgagtggaaagcacacactacaaaaaaaaatgaaatttcagacggaaaaaatccgtcggtaacaaccaaaatccgtgggaaaaccgatttagcgacggaatttccgacggataaaaatccgtcggaaaaaggggcgtaggaaatgttaggcgacagattttatttccgtcggtaatggctcgtgggaaatttccgacggacttttctgtcgaaaatactctatgagaagcgctttctacgtcggttattaaagccgtctttgataatggtgtcctggaaagtcgataccttctaagacggtttttaaagtaaccgtcttagaatgttatttttaaaaaaataaaatagatcattctaaggcggtgttttgcagaaccgtcttagaataacaaattcaacaaactttttttgcataatccttgaaaagttgcgaataaaaaaagaaaaccttaatattattaaaaccactcaccacatatgctacacaatgcttacacacacacacacacactatatatatatatatatatatatatatatatatatatatactatttaactgagtgtgtgtaactgtgtattgaccattcaagaacattcactagaaatcaatcttatttttatcttcaactatatttttcaggcctctcttaggtgcttggcaaatggtttttaagagaggtagctgacagatatgtaaagacaccaaaatgctttatttgttatcttactaacatgtttatctgatttctctttgtttcttcttgcagagtccttgactccttgttaagtaaggtactatcctctttcattctttcttccttctaacaatatttcttattttaaacacccccccccccccaaaaaaaaaggtgcatgctatgagatgcaacccagagattcaaattcatccaaagtgataaataaaaacaatcagctccatcttttttcaaagttgagatatcagcactatttgaagagaataatacattcacaacaaggagggattaaactaataaaattggggagaaaaaaagtaccatggttgtcaaatctatgcacatgccagaaataataacacccttaaacaggataatgttaccttagtgtctctactataaggaactccattatatcctggctgcgaaattttagaatcaccagcattgatatctccattagctgcacggacagcagcactagctctagcttcccatgcttgaagactgccaaatttagggacagacaagtcttttacccgactgagttggtccattaaaggcttgagctgtagctgcactagcacaagaaatacaacagtcatcacaagattaactgtggaccagtagcaacaacaaaataaatgtcaccaatatgtaaagtctaacaatatatcatgaaattcgaatgagattaagatacctataggcaaggttgtgacattcataaactgaccccaactttgcatctatactgaatactcacccaacaaattgtgcccagcatatatatatatatatatatatattatatatatactagcatagaatatgatggttggtcaaacctagtaaagtagttgacctgctaaaaacgtgagtgtgtcaggtttagctcaagattatctggttgtcttgggccatttctaaactagagtgggtcatacattggattggaccaccaaaacaaggtgtccactaatggtctaatgcttggcaccaaaatgctggtgacaaccttgaactagcagcaaattcattgttttgatcatctcctaagtcccaattagggctggactggaatgatgtatagaagaatggaaaacaaggatgctgcctcatgtttctttcttctttgtaatttgttgcagttggtaacctccccatgctgttacagttacaaatttcttatattggtaagatggaagcgctaaattcagttttgtctttatcttagtcagtgattatcatttagcaatcacgtgacttctttgtacatgtccaaactacctttaaccaattttctgccatcttttttcctcaatcaatgtcataaatatctcctcatttcagctactctcaccttcttttgtccttttaaagcccaaaattaactaccaaagtatagttgaatgtatcctatgtgtgacatcctcatttattgatccattattttgtaatattgatcccatatatttaaagttaaaaacctatggtatcacatcttttcccatatttacttccaagccactttcctccttgctaaaatcgcaacatatatacattatcttctcttaggtgaaaacattgcttccaaagtatgtctcaaaatgcaagtttctgttaattgcttcccttgacctaatcaaaactatatcatctacaaaaagcaagcaattagggataaatttttatgcccttggtatgcaaatccaatactaaattagacaagtaagaacttaaggccaaacctttatgtaatcctatcccaatatattgccgagtgttaagagtatctacaaaaagttttaaaattatatatatatatatattgtgaaatcaatcagtatctaatagagaaaatgtcactcatcatgtcaggaactgcttctttatctcatcatattccctcatttgtttccttatttaattaatagtcttatgatatcatcagacttgggctttactagtaatattacataagtgttactagacctaattattagtataaataggaccattattgttagtattttgcatcacaccataacacatcatatcaatcagtctaatagaacatgattattgggaacctcatttctctcttttcctccttccttgcctaaacacaaataatttcatcacgcattaagagattaagaaaaccacattacaacagtattgtagattaagacgaaccatcatcattctttctatttatattatttctcttaatagattcatcatttcttctattggggaaaaaaataggacttacatgccgatcaaatctgccaggcctcgttaaagctgggtcaagaatatctggcaagttcgttgcagccattaatattattccctagaagataaaataatgaatcaatttctaaaaccagaggaacaaattgcactgcaagctgttcaaatatacctcattctgctcaaacccatccatttcaagaagtagctgatgcaatgtcttctttgtgtggccctcccattgttttcttgttgatcccacaacttcaatttcatcaataaaaatgatacaaggagcctacataaagataaaagggaaataaatattccataatcagacaaaaaataaaggacccatgtggtatagtacaaaaccagattaacaaacaatttaaggataccatttgcaaaagtcaacagaccttctttttggctgcttgaaataaggatctaacacgtcgagcaccaactccaacaaacctgagcatgaaagaaaagtgatataaaaatgaacatccctaacagccaacatatcacaacattccgtaatgtgacactagttgctacagtatatgtcagcgtgcaaaatacttgctcaatggcttggataaatacttaattaaggatgacaattctatccagagcctataggtacccgcaatgggtaggataaatacttgctcaattgggatgggctaaggcagggctggggatttacccacaaaatttaatggggaagggttcaagttctatataaaaaagatgtttatcctcctctcccctcccacccaagacaagaggatcaaagaaatgcaacagtgcaacacttctcattaattaaggactgacacagattgagccctaaagttggtaagagtatgttcccattagaataacgataataaaatacatttagtaatcaataacagaaaagcataaacatattctgtattacaattgacaactactgtattttcattatcaaggttgcaatataaaagcattctttgtatgttattattttcaaaacaactaatgaattataatttacccacattacattacagttgtgactgtgcaatatcttgtttctgatctcaagagactgtatataaatgcgttcaatgctaaaaatttaagatattgaaaacataaaaagtgaaagaagacttacatctcctcaaattcagagcctgctcgatagaaaaatgggacaccagcttctccagcaatagccttcaaggtcccagataaagcaaacactattagatcattacaatgataattttcaataggttaactcaaaaggttgatgtcaataatgtaggattttagttacagtcacagatcaaaacacttatgcaaagtgtaaggaaatatcaaagtgagagacaagaaccaaagtccatttatgtccttccttgaacttcctaatagaatatagcatataacagtgtagtgtggcatactaaaaatgataacgaatcctaaaaagcatatggaagaagaccaataggttctaaattgtataatacaataacttcataaacactgtaaaaatgtgtctgacaagacagaaactaactgaccttggctagtagagtttttccagttccaggtgctcctgtcaaaagaatcccctgaaaagaggaacactttagccacacttgatgaacaaaacataaccaatacacacaaaaaagtatgataccttattataagacaagcaaattgacaaaaaaagctatcaggaaaaaaaaaagaaaaaaaaatgacaaattaacctcttcaaacctttggcaactttcctccaaggcgtgtaaacttagatggattttttaggtactccacaacttcctcaagttcttgctttgcatcatcacacctttcacatccttaaaggtttttacattctgcaaggaaagaaagtgtgatagagaaagattaagaaaagagaacacataaggcatagaataacttttggtttactgtatattctacacacaaggctaatacaacaaataaggaaacttgaaattataatgtcagatgtctttcagaaattacggggtggtaagactttccaactttttcgtcaactggtccacaaaattgcaagtaaaggcataattagctaggattattttattaagataaagaaaggaaatgattatggaggtatagtatatatcatgccattgttcattagcctattccacctagaatcttctcattcaaatattcactatccatcaaaattctagcttatccaaattgaagctattcaatcacagaaacattcaagagatacagaaataaatatctgagaagtgagaactaagaacagattaacaagttaaccttttcaggcatcacttccttatttagcatctttggggcataggaagaacttgatccaactcctgaaggtccaatcccacccaagcttccaatgtatttttgaagtgcagcagcaccaataaacctgaaaggatgtgtagtagcaatacaagtatataaaaatcagagagtggatgtttctacatggaaaagagagggagaaagggaaactagggactcataccagaccaaccccacagctacagtgatcaaaatagttgagataagctcttgtgcaaaacgtgacttatttgatacttttggatcaacctaaaagaggaaataacttcatgagaatccgagaacagctaaaaaaagattataactatagcataacattcattatgaaaaacaacaagttcagaaagccatactcacatttcgtcgaacacttggaacacatcatcattcaccccgaattctgggtggtcctcggtgtgtgcgcgagtaccgccatcgtcctcggcgtaaaaatgaatcaaatgaacacaattagctaacgagagataaacacatcagagactagcgacattacagaagcaaatcgcaaaaaaaaagtagcaagaatttcaataaattactgaagacccagatcataaatcggcacccaaatccagaaaaatcaatcaaaatcgcaactttggagaaaccaaggggttggattgagtgcagaaagggagtgatgggatttggaaagtggaagaaaggagcttacattcttgacgaagataacatttgcggcggcgatggcgatgactacgccgtcgaggatggtgaccgggccggtgaggagactccacttccgatagatcatctttttcttcttgctctgattctctctcttttaggttcatcttttcacaaatgaaacgaaatctgcaatggaagctcttctgcctacctatgttttaaaaggacccatattagagggaaacttgcggctgcccttcacgcacgatgaccggaatggatctcgcggtgtcaccggtgtagccatggccgatgccatccttggcttagggatgggaagagacgcttaaaacgaaggtaagagtaggagagtggtaagggattgaagagatagtcaaggctagggttcaactattttttgttttgggaaaaatccaatttctaatgtaataaatatacatggaaaaatgttaatattccgacggaagttagtgggtaggaaagggtgcatcggaaaacatcgcttttcttgtagtgacataagagagaaagaaaagaaagaggaaaggaaaatggaaaaatgcgtgtggtatggaagaatttagaaggttgtttatttaaaaaaaaatgcatagagagtcaatggaagaatgtagaaggttgaaatggaagtaataaaatatatatttcattttcgctgtggtggtgtaaaactcagctatcatatgtttttataaactcgaaattgcaaataaaaacatttccaagtgcataaagagtcattagcaagagataaattatactttttctttgattatttttaatttatatttcatttttcttcaattattcatactttttatttgtatttataaaaactaaaaaaatgttaagttttaataaaaaaatataaatgtgtggattttttggagtttcttgcggtttcttgtgattttcttgtattgaagcaaaattttgtttgagttcctcatgagtgacatagagaccacaaaaagtaatgcgagaaacacaaaaaggtgataaagaaacccattttaaatgctcccattgaagatgctctaaaaaagctaagttcaagaactatgaaaacttttactgtaacttgtcatcctcattgggaacaatgaccaatgtgccacattccaaataaaaaatttccacaatgtcatgccaacagtaaatattaccagactgtcacgcgggctatttcggcccacaatccagcgaaatatgtgtgctaatgtggcatcattctgttggccacgtatttcgctacatgagccaacgaaatacatggtcaataacgggcaggacaggtgacagacataaagtatttcgctagggagtcaagcgaaatatgttgggacacgtgtcactgatgtatgatttcactataggaattggtggtgatattgattatataaactttaaatggttataacttttgataaaaatgtttgattgaggcgttcgatatgtcaaaacgctcgaaattaacataagaaatcctaagcaaattgccgaaggggatttggtcaactattttttccaaaaaatgtctctaagtaggtcaaaattaggatttaggattcaatcatccaaaaatttacttgtttttctagttttttaattctttaattagttaatttaatgctatttttaattagttacatgacacatgttcccaatgacttttttttcccattgctacatattttgcttggcccccagcgaaataccttgcgctgccacgtgtcctgccctcgtctgcccggtcactaacactttgatcccctatttcgctggttcatgtagcgaaatacatgaccaacaaaatgacaccacgtcagcacacatatttcgctggcctgtgggacgaaatagcccacgttgtagtctagtaatatttattgttgacgtgacattgtgaaaaatttttatttagaacgtggcacattggtactgtccttcctcattgtccttggctagttgatatagtgttgctgtaacttttattgcttttgggtcattggatattgatttgcttcattgaatatggtgctcttcgggagcttgttatgttttaaatgtgatttctatctttgtacttagggatgacaaacggatcggcccgcaaaaaaatggggcgggctggcctagcccgcttttgcaaagtgggctggaaatgctagcccgcctcgctttaatgcgggccagccagcttaaaaaattttaaaaaaataaataagttaatttaaaaaaatatagaaaaattatattaaaataaaaatatgataattaaaaaaacacagttaaataaaaagtaaataatttaaaattaatcataaataaataatgttatgtgataattcacaaaattacaccatttgcaaatagaatttatggatgtaaactgtacaaagtgtaatatattagtaatgaaagactatttgaaagtatcattatcataaacatttaaatattaaaacttataagttaattatgagagtgcaaaagagtataaattaaaagaatatacctatttcaaaatatgttaaatatatctatttaattttaatatttaatattttaaataatgttggcccagcgggctagtccgccccgccccgcgtttggcccataatttgcgggtcggactggctcgtcccgttttttattagcgagttgatattatcaacccagcccgcatttttttactggctaagcgggctggcctggcgggccaggcccgttttgccaaacatatttgtaattttttggaatataatattatctttggccttaaggagaaaaaaaactatgaaaacttagcattttggttggaggttcattcattctgaacattctctatacaagttaggaatcttcatcatattaatgcacagaaatgttaaaattaatttactttttgcattaaggaaatgttgtgaagggtctaaatttcatgtttaagagtaaatctaattccatttttgtttgcctcccttttatgtgttataacatatttcatgccaatttaatagtcatgtaaagattttatactttcaagcaattaatgatcaaattcatgtaatgatcatgctctagctgtcaacctttatccttaatttcatttgtatgagatattgattagctaccagtgctttaatatttacaagtgtattactaaattttatgcacgaggaggtatttgaccactttttattttgctattatatggataagatgttataaatctgtaacaccataagtctataacatagtctgtagccataataagtctgtaaccccgtaagtctacaaccatatggattgcgctgtaacaccataagcctatatataatcataagtcagtagcaaagaatgtgttgcagccaaaggagaggcaatttgcagcaacaattttcaaatcatcccatggaagacataatttaaagcttcttcaagtctcatacaaattaaggtttaagttcaaaaatttcaatattcaaaaatgacataccacatttagaaaaccatatgcagattctcaagcacatttttaacatattcataaaggatacataaaatgaacccttctatgcagaagcatcatctagtttaagaggaatacatccaaggcctatttcattactaggtatgaagctattgacgttattgaaaattaagacctcttctgaggaggactcattcgagttcccgtaatcttcccacatattttgaagttgcatataaaacctcttcattggtgttatctttttgcgtaccaatggtgaacgttttcttgtaggaatcttagggctccataaacgtcgactttttccacctagcaaaaattactaattgtcagaaatataataaatgaagtcacacaacaatgtttttcaaagaaaaagataacttatttactattatcatgacctgtaacatagcttgaaacaaggagattttttctaccctttaaatgttttctacccttcagagtttttctacgcttcagctttttaaggttatcagggtactctggttgaaaatggttgggaagatagttctcaagacttccacatttcctgtatcttgacccacatgcattgcacaatactggcttgtcttcaggtccattacgccaaagtggagtacctgatcatggagccatatatatgttggtcactactcgaataatttggaagtagatattttggacaaaataatttgcataaaataagaatggttttgcttgcttgttcttaagggttatctgtgcctatattcatagagacatgatagttttgaagtgtcttagttttagatacataactttttgtagaaacaatttctagggtttgctttgtgtgtgtgtattgaaaggctaaaagaattttattgaaaatgtgtgcagcacaagaaaaggcggatgtacatgaatattatttttcatagaataattagtcctcctcgcccagtatacaattaattatagtacttctagctagctaaaaaggtattagcctacttgagatttgatagaatcaaaatacatagattacaatttcttcatatcattattcattaggtaggctaacacctgaattactatttaaataaaaatttcgatgaaaatgatttaaaggtaatattagacaaattcggtattatttaatgaaaaacatcaattactatcctaacttggtcttcagtgaaacaataattacttggtctttatacccaagatttcaaaccaattataattgcttttaaatttatgttttcttcaatttttatttttttaaaaagtcatatcatctcatcataaatgacacacccccttttttttaatgcaattagaatttaatatatgcattaatggtccaaacttaaaagctcattaaatgaagcaatttatattccgtaaactcacttactgttttttctttttctttttctaacacattaaaaagattaaatgatatatttgttgtggaaataggtgaacatttctattggtcaatagggagttttcaagtacatgctccaagtagttattactttttggattgtaattgttttcttattggttttagccattctaattatttgaaatttagaaaccattttagctttcggtcagaattttctttttataacttgtggtctcatgtatagtacctagacccatcaatgtgtcaataggtaacttgattttgaaaagttaaggacccctttggttatgttttcatttcttgttttcactttataattataaattttactttgtttttaatctattttctattttaaaagatttataaaaaaattagagaaaacaaaaaaaaagttgtttttagtgttggctatacaaatatttgaaaacaagaaaaatattaaaaataaggtaacctttttataaaattacggtaaacacaaaaaatgaaaatataaataaagatagtcatgcttgaattaaataagattactatcaagaataaattaagttttctttcaagtatttaaaaaatttaatttcatgaaaggttaatttgatttagaagtaaataatttatatttaaaaacttttattttaaagaaaaaataataaaatttagcataaaatatcatactaatgtagaattttcttttctttttctagtttaacatgcttagttttgtaatgttggttaaaaataaccaaacttcaatattttcatgaaattacacttgaaaaaatcaaaggcgagtttgaactttggtgcaattgaatgcttgtccaagcataagcttagacaaggagaaaaaagattaagggcttatacatcataaatatttaactaattagattatataattgtataagttagaacactaaaataatttttaaaaggtcaatagtattaacttcttgatgccaatactttttgaccaatttaattgaatcatttgactgattttgaatgtcttgaatttgtaagataaaatattcatcttttttgaataccatatacagtcaccatgttcaatctaacggaaaacaaaagttctaattaaccacaagaggacttacaatgaattttgcaatggaagcatggaccatgctttctccccatatctgtaatgtttccttttatctgacaaatagaaattatagttatcagaaaagcaacaccacaaaagccttgaaaagaaatcaacttaaagaacaaactacaaaattatgttacaaaattcaagttgtaggactaccggaagaaacagaacaaatcttcagtcaactttaattaataacataaaagcataattaagattccatttattttttctactctcttctcttcaagttttttttttttttttatgcaattgagccgtgcttacattataagttattcaaattcatatgtttgacaaggctaccttgggtttttttaccatttcatcatggaaaggatggcaagtagctccatgctctgtgaatgtccatctatatcatcatatagggacaaaaatatgcagtcgttatgcaacgcacatgaactttaataagccattaaaaaaattaatataaaggagaagaacaattaaaggtggggttgactctacaggattaaaactgtaaaaaaattattagattgtttggttgtttgttgaattagaaagtccatttaatactaaaaacatagtgagtttaatgaattgtactcttgtatatgtgaactctctttgcccccataataagtattatgtaagaagaaaaaataagttttaaaataaaagttattttcgtttttaatataatattaattattatttttagtttatatgtttaataatatttttagaacgttgttgttatgcttcatcatttctaaaaaaaaaaaatcggttaattttataaagttgttacactcttttatttacttaattattaatttttgttgatctatataaaaatgtactactaaattatacttttgatcctttatcttattttaagattcatttttaaataatttattttgatcttttatcttttaaatttggatcaatttggtctttcttaaataatgatggcttcgattttaagacataatttttgaaatagtgattaattcaaaacataaaacttgtctcattagatttgcttacatgaaaactataaaatccaactagtgcatgtttgaacaaaaaaagatcataaacatagtaataatctcatgaaaaatagtcaaatgaataatcaaaaaaaaaaaattaatatcattttttactgtgttttatgagactcgcttttcacctgatttatatcattttatagttctttttagttcaaacatcaatttagttccataatttttatacaagtgaatttagtgaaacaaattttacatcttgaattagtaaaaaataatttcatatttgtgtctcgaagtaaaaaataatcattgttttggaaagactaaattaatccaaatcatctccatatgaactaatattataagaaatataaaaacttaaaatgtaatattaacataaaattattttctttaaaggcaaaaggtatagcattgatatgataaggatgcaaatacacaccccaatcccaatctgtacaagaggtacaggtattacatacatcaaaaaatcatttctcctaaagttaactttctgtcccaaaaatgccatagttaacttctctgaacatcaacaacatttgaagcactgcaatggctccaaacactaggaagagaaaaaagttcctggtttgttgccgcctttgtacattagccattgccatgagatgtgctttatggcagccaaaataccccctagatcacacagtctttacccttaaaagctatactatttctatggttccatatgcacaccagcaagtaatgtgccatataaaatgtttacatctacggcttttcctccctctcatgcaaaacccaaactgagagtgtgactgggaaacctcctgaggggaaacattttcgatccccatccatttaaacacttcacaccatattcttgaagttatcaaacaagacagaaatagatgtgatatgttttctacctgaagatgacagaagttttagtaaatatttattttataatttataatttataaaaatatattacttatatcaattttgtttttataaaaataattttttttagaatctgttacataaaactagaattcctatcttttaggattttgctttttacttttagtaactttacaagtaattttggtttgttatgttttttttcctgcaggttggcttctaagggttcaataggggttgatggaaaatctatttcatatcaaatccatgaatttgaaaacattgtttatgacatgaaattgaaaggaattgtttttcttgatgacattatgcttgtgactttcataatttcaaaattgtcttcttggtagattgattttgctcgaaatctgaaacataaagatgaaagtttcacatttgatgatttgcctgtttgtctccggttcaaaataaacatcattttttccaaaaggtatttgcaaaatctgattctcgttctaaggcctatcttgttgagagctctaataagcctttctctgagtctttcaagaagcatgggttgaacaaaaataagtttgatagaaagctttctttttctaaaaataaaaatacttttaataacaacaataagcctactaataaaaatatggggaatgaaattttttgctttgtttgtgggcgagctaatcatttgatgaagaactattttcaacgccattgccaacctacgtctttcgtccctaaacctcatcctaatgttgttagcattggtgctgcctctgatttctcatctgacagagtcaagcaacttattgtgagcatgggaatgggagtatggcacatgtgttaggagaaggtcaagtgaagctatagctatctttagagaattttcttgttttagatggagtctatcacatttttgatattaggaaaattttactatgtatttctttgttagttcaacaagggtactccaaaagctcctcttcccacgaaaacaaatgtttaaaccatgtccgcttccatgtgtttctggaattggtatcagcaagcatatctccagtagtcgctcctttatttgtggtaacttgaaacaatctaggtgacatatccttaagacacagattatcaagtcctttgtggctccaaaacgcggtttgtttaccactcccaaccttcctctgaaaaagatcctcgaaccatccatatacaccttcaaacctgtaacttgtattctgaatgtccctccaccattaatgtgatgcatttggccagcttcttctagataaagaaaaaacatctgctttgccgtatttataacacaataaaggataccacagaaactccttatcattgagatttctccacttccactttgagagcaagctaacattaaacatctccagagttttaactcctagacctccatcttcttttgcaaggcaaactctgtcccaacttacccagttaatcttttgggtctctgccactccattccacaagaactgtctttgtatcccagcaaggatcttcaaaactttctttggcaccttgttaatagtaataataattaaaaatcaccttctttatatttttcaacacttaaattcgttaataactaaggaatgaatactatcaaagattataaaaaatcttattaatcatggccaaaaatataaatatttttagtgtgtgtataatatgttttcttaaaaaatttggggcatggccccattcaaggcttcaaccacaactaagctccagccctggtggtggtggcatgttgtagtacagtatatgctagggaaaggtatcaaaagatcatgtaagagagtttactcttgttgggacttggaacaggtatgaggataagtggttaagaaaaagtctaagatcaattggatattttgaatgatacttcttttactggctggtaagatggaaaacaaaattgaaggttgatgttttgagttgacgttggaatttttagcaaaaaagaggggagaaatggaatggtttgcaaatgatatgtaattaatatagtaatgtatatttcaattctaaagtgtaatgttatgcttgcagggttggactttttctgtaataaggttgggtacccttgtaccctagttaatatatatatttttctttggatgataaaaaataaaaaatgttaaaaaaaatagaaacagacccgtatgcagtgcagcattgtctggaagaaatttccagtgcttcccatctacaaaggatccttcaacttctcttttcgatcgcttaaattcctaattttgaattgcaatatttttgtcatacagatatatttgcattgcaaaaatatataatacagaaaaggaaaacatttgtaatctttttgtctttggtttttaaaacgcttgttttagaaacagtttttaaaatttaatggattttaattggatgcgaaaccagtttcttataatagtgtggaattgtttataaaacagtttttaaaactagaaattgagaataggatcaaacaggccctaactcacacatccttcagttcaaagttgacataagacaatcattattccaaagtatgccgatttcatattgatctatatatagtacttatcagatcatacatgacttctaatcatctcatgaaacacaaacacctagtgtagagacagaatttaagtcttgagaaaggctcataaaaaagtttaattcaaaaagttcaatattcaaaagcaatatgccatgtttagagaaacgtaaagattctcatacatattcatgaaggatatacataaatgaatccttctatgcagaagcatcttctggtttaagaagaatgcatccaagccctatttcgttactaggtatgaagttattgacgttatcaattaataagacctcttctgattcttggaatgactcatttgagttctcttcatttttccacgtcttgagaagttgttcatgaaacctttggattgatgtctccatctgtactaagtgtgaacgtttccttgatggaacataaggattccacatacatggattttttccacctaacaaaaatactaatttatatataagaagcattcacacaacaaaatattcaaagaagttaacttacatatttactagtatcattacttgaatttgtagcatagcctgaaccatggagaaccttgtttctaccctctagatttttaaggttatcaaggtactcaggtttaaaattgttgggaaaatagttctgaaggccaatgcttccccatttggtgtatcttattccacatgcgttgcacaacactgacttgtcttctggtcctctacgccaatgtggcgaagctgatgaaaccatatatatatgttggtgactggctcaaacatttgagaaaatgttttgaacaaaataatttatataaaataggaatagttattttgtttgttcattcttaagggctacatgcgcctatagttatagtctatagagacatgatagttttgaagtgtcttaatttatcataaataactttctgtagagacaactatttttagttgcgctttgtatgttgattcacataaaagaaacaaaataaacacatgtacgtgattcttaaggttacctaattattttgaattataatacatgttaatatggttttgaattgtccatatatttaaatgaacaaacatgtttgcaataatatatgtctatttatttcaagttaataacgtatgtttttttcattgggccgcaataattctaaaaacatatgtctatttattcatatatagactagaacatgacatgtacgttatgatttgtaattagtgatgtaaaacatggcgtatttatctgaatagttatattttgggaaaccaagaactgcacacgtaccctacccataaatcaattaaaaattcaaaataattcttaaataatagataaaaaaatcaattatatgtttcttttaatttgggtgcctacagaaaattcattaaacgtgtgtttacactactcactagcaaacatagaaggtagaaaacacataggatatattttaaaagaattataaacaaaagaaggatatataataaaacatataaaattaatatttttatacaaaataagagaggaattctctcttaatctatatctatagatatataaaggaaaatattttggagtacatatttcttttttccttttacccctataattatctttttaaatatcttttttatccatataactattctcttcaatcaagacacactccacttacatcttgaaaactatccactgttatttaactttattatctttttcattatttttatttttcaaaaattatagaggcagagtgttactttttcccctagtcatgaataatagtggttcacaacatattttccttcaccttcgaagcccctggcagaggtaagagtatgcattccaagattattatttttttttttggagaagctattaggatcacaaaattctctatcatgacatgagcatacagatttgattaggcaaaactctttagttgagctagaagatggtgatagccatggagccaaagttctacattgatgatgatagtagtaggaactatggttgccatagaaggatgttgtgattgtcaaacacctagggaagaatattaactttcttacaacgtgatcatctgaagacaatttggaaaccttattgggggtgtagatgtagttgacattaggcttgatgttttttttatggtcaactttgatttagctgaggatagagaaaatgttatggtaatgatccttgaatgatttttttttttatcgatcactatctcattggtcatggatgtccgacttcatagcatccaagatgaagatcaataacaaccaagtctagatagtgtttttcctgtttatgcaagaaatactatgatgagtgttttgttagcattggctaggtcggtcagtgtaagtgtacatatcagatggatttgagccatcattgacacagttagagggaagtttgccatggtgagtatggaaatggatttgagccatctaatagtgggatatttatggtttcataacagatggtttaatattgaatattaaggattgcactcaattaatttgcaaatgttgcaatctatatggtcatgtgataagtagttgtgcgcaacagaagatgaaggaagtcacactattggcgactgcctaaggtggaggggagacaaatttgacgagggaacatgggtttgccctaatccgctagctggaatggcaatcatgttaattatggaagatctgtatagggaatggtttagtaaaaaaaaggaaagtgaaatcataaggttttaaatcatacatttaattaacatgattgcattgttagatttagcattggcagatcataggctttcttcgagagctgtaataactctatttatacgttggactaaactctttccccaatcagaccaaaattctactattaattggttcaggtttctataattttattatcaaattcaaaccaaatcaatccaatcataaaaaaaactgatttagcttaaattaattggatctaaatatttaaaatttttatttttattttataaaaatgagaattatttagaattttgtttttttctagatttttacatcacatatatggagtgcaaaacggatcacattatcacacagtttgatactagtacattaattaactaatttaactaaataaaataattttatttataatgctttacaattagaaaataacttatattatatatataaattaaaacgtgaatagtagactttagtctaagtatatataggtatcttaattataaataaggatgtaattattgaaatttgctactttcgtgtgagattttgactctataaaattgtgtaaggtagaggcatctttagtgcatgctttaatttgtatttcttaacttaataataataataataataaatttagttatgtatcatggatcaggttggttcattgattccaaaaacaaaactaacgagtttgaactaattgagttatatttgatatgaatcggctttagtatcgaaagggtgtaatttttttttaattaccgtttgtgggtataatttaaatttttttaccaaaaaggggtaagtcataatccctattatgatttctaatttagaagtcgtaactatatattttttaattttctaactgaaatcgtaaaaaaatttacggcttcagtatatatttttttttaacccgctacttcaaatgtgtaaaaaattttacgactttcaaaaccttttttataaagtcataaaaatttttacttctttcaaaactttttttctttttttctttttctcattatgacttttaaaactttttttttctttttctcatggaagtcgtaatgagtcttacgactctttctttttttaccttttaatttttattttactttttttgtaagtttttaacttttttatagttttttaaaacttttttctttcgttttttaaacttttttatatgtttttttttactttttaaaatgataaataattttgttttaagtatatcattttgttttttatatgttttttaatacttttttccattttatcttttttttatacatttttagtttcttttttaaacttgttttcttaatttttttagtttcattaaatatttgaatatgtatttgatattttttatttaatattattttatttaatatagtttataaattttaatatatttttatttaatattttttaatattattttatttaatatatattatgaatataccaaaatttaaatatattaaataaaaatatataaaaaatttagaaactatattaaataaaataacattaaataaaaaatatccaaaatataatcaaatatttaatgaaactaaaaaaattaagaaaacaagtttaaaaaagaaaataaaacgtataaaaaagttcaaaaaaatttaaaaaaagtataaaaagaacatataaaaataataatatactttaaaaaaattatttatcattttaaaaagtaaaaaaaaacatataaaaaagtttaaaaatgaaagaaaaaagtaaaaaaaaaaaactatacaaaaattaaaaaaaataaaaacttataaaaaagtgaaaaaaataaaaggtaaaaaaaaagtaataagactcattacgacctccacgagaaaaagaaaaaaaaaagtcttaaaagtcgtaatgagaaaaagaaaaaaaagaaaaaagttttgaaattcgtaaaaaaatttacgactttgaagtcacatattaaaaaaaatatatactgaaatcgtaaaatggattacgatttatccctttttgttatgacttctaaattgtaattgtaaaaaaatatataaattataatttgtgttatgacttctaaattaaaagtcgtaatatgaattacgatttatccctttttgtaaaaaaatttaaattatacccacaaatggtaattaaaaaaattacactatttcgttgctaaagccatatgaatcttcaaagtacttaaaaaaaaaaaacaatgaaaagaacaaaaattctaagaacaagaagaggacttacaatcaatgccgcaatggaagcatggaccattccttttcgccatatcagtgaatttccttttgtcttacaaatagaaattttaattagttaacaagtaaaataaattgttgcaaaattcaagttgtaaggacaatgggacgaagagaacaaaacttcagtaagttaaattacatacattctttactctttctttttgtctttcttttatgtttaattaggtgatacttgtttctatttaattttctctcctatcttcaattgttttgttcttatgcaattgaacagtgcttactgaaatttaaattcgcatgaagagagagcgacaagttgcttacatgccctgtaaatgcttatctgcatcatcatataggtccaaaacgatgaaaccgttacctttgacaatacacatgaactttaatactagattaaaagaaaatattgtaatataaaggagagaaagaaaggtggtagaggattacagctctaaaaacatttaacattattattaaatataatataataaattgtaataatattattaaatgttatatgtattaaattaataaataaatttcaataatattattaatttttatatacattaaatataatatattgattgaatttaataaatgtaatgttaatatatgtatattaaacgtataacttgttaaatgaataaaacaattatctgtaagaataatttttttataccaacttatgcataattctcaatcagttatatccttttagtgttaaattaatagatatgcatatgtgtgttcaagtatgtgcatatatttatcaatttatatgcattagtatttaatattaatattataaattagtaattattagtatttaataatatttcatttttagtatttcataggatataattaataatttgttagtatttaatatttaatttaagatttattggaatttaatatttactaaattaaatattaaatattttcttcaaaaaatgttaattacattaatagactaataaatatataacaataataatattaaatattaatagatattttttggtataaaaatattaaaagatattaatatatatttaatatcaaaattaataatacaataatttaatattaaggcttaaataagattttggttcctaaaaaataataagatgtttttaattttagtcctctatttttttttttagttttaatcctttaaagatttaatttttttattatagttcttgttatcaaacaataacattaattgataaagtaacaatgacgttttcaattcattaacttactatgtcattgaaaaatctaataagacaatcacatattaacttttttggtaaattgtgactttagatcatcatgttaatggtgtctgactaattaatgaaagattttaaaataaagtttacaaaaaaaaaattacatataactccatgataacataacaagtcaatgaattctcaatgtcactactatgttataattaacgttattatttcatagaagagactaaaaccaacaaaataaatctttaatggactacttttattaaatgactaaaattaaaaagcatcctaatttatagagaccgaaaattctttctttttttaccacaagaattgaagacaaatatgggaaattttaactcatataccatatttaaccaaccgagttaaattccttctttacaaaaacttattttagctttaatattaaattattattaattttaatattatatataaaaatttatatgtattgatatttaattattattactacataagtattaatttattagtatttaatttattgattattaaatgctaataaatcttaaaattaaatatttaataataacaaattatgattatatcttatgaaatactaaaaaaattaatagttattcaaaaatgtagtagaccaagctcatttgaggctggttctggacaattggttaaggggattctatgttgtggggatctgaggactactattgtattaataacacatagtgaaaaaatttaatcaccattattttaaaattttaaagttaatgaaaaactaatattgtttacaaaaaattaaagaaaagaaaaataaaacaattaaaaaagataaaagataaaataaaaacttttaaaatttaataagccaaaatataaaaaaaaaatactaaaatataaaagactaaaattaatatttaacctatgaaaaactaaaatagttttcaatccataatctcgtgctaaattttttatctccaaagcaaataaaaagttgtactaacagataaatgacttttaacggtcaaccagaataatgatgacttgttcttcttttcaattcgtatgtatttaattatttttctctagccttttatttaataattaagatcttatcttcacattactgaagactgaagtagtatctaagtaaattgagttgttttttttattatttagtattgggtttaattgattcagctcatatgcatgaatgacatatatggtatgtacaaaaaaaaaaaaaaaaaaaatcggcgtatggttagtaaggtctcgtttcaaaattttatatagtataattaacaatttccctaagcaaacgacatttaagcttttgttgataaagtttatatggcatttactaattttatatataaagttatattgtattagaaattaaacgattaaaaaattataccttcaaatagcatttttatcacatgaggttaaaaacagttatataacaaggaaaaagaaaaggctttggagggaccatgacaaaataattctacctccaggctccggtcctagatataataaatataggacaaatcatcaagattaataaaaaaaattaattatttttaattcatactactagtcttcctttgaatcaagttgtattttgtaagctatatattacttatcatcaataatggatagaaaattattatgagagaatgaatcggctttggattgttttcttttttcatcaagctcgtttaatttggagatgggtatattgtgcagaattttgtacgagataaagaaaactttattagtccaattgttactccctttccatgatgcttaattgttttcttgtaatcttgtgcttgatacatgttcaagaacacagaagatacgaggggtcagtttttgggaggagaggtatcacgataacaacttcatccatagttgattacgccacaatggtgactgactcaaacaattgggaagatgttttggacagattaaattctgtaaaatgcgtattcttcttaagggcaacacatgagcctatatatttatatatacatgattgttttaaagtgtgagagatattcgaaatgaataaaaggttgtatcatttaatgaaaatatgtgtctatttacaaaagggtatatgcaagtaaagttatattcttttatgaatgtgtatattttttcataaaaagatatgacaactcatgaaaagatacgagtatgaaaggttgtatcctttcataaaaaattgtcttatttcattaaaatatgtttctttttatcaaaagttattagatgtgatttttcactaaaagttaaaacatacgactcatgagatgaatctctgcaaaaggttacatcccttcatcaaaaacataaaattgtccataaatgtgcacaaagataaacaatgagaatatcccaaaaaataatcaaccctaaataaaaactactaaagagacctgcgattccataaaaaaccatcgtggccccttgcggaataaatggaaaataaataaagtccgaaataaatgaaaaatcactaattttctcataaataaagaacaaatccatatcattcaaatcaatttctttcttcctttatgcataaagagaataaaataaactattattttgtaaattaccattgatgtgatgcttgatttgaatttgcaaatcatatcaaggaactatattgaatcctggagggaattgcgagtaaaccttattgcatccaattaatctttatttatagagattggtaggaataaattaaatcttaaggattatcatcatcaatgattttttcttaaatatttcgttattgttgtagagtcatcgccactaatttgcaccaacatgaagtatcttagttttatagacataattttccagagatgcaatagtttttagagtttttttatcgacgtcgaagaatgagttgatgactcataggcagtggtttggtcaagagaaatcatcggaaccatagcgaaagtgagtcttcataggataattgtcactgtatatggattcgaacctggatgatctattcatgacctgaagtttggatgaaactaagtgaaggtccgaacggtcgaactgatgttgaagaatcgaatgagtcgtggttaaggtgaaatgccactcaaacctatgttcttcccgaaatgtgttaaggcgcaacaattgaatggacaataatttaaatacatgttcaactaattaaacaaattttttggtatgactcactttgtatattaatccaaatgctaataataataataataatttgtaagaaaaacacatatacatgatatattcttaattagtatatattattttgaattaaataaaagacatattaatatgatttttaatatcgtgtccatatttaaaatgaacaaatatgtccgaagtactaatatctgtctatttgtttcagattcataatacatgtctttccgtacatggcacagtaattctcaagaacatgggttgtttatcataaatcataatttgtgatattccataaaggttttggaaacgaaaaaaaaatccccttcaccctacacataagtcagttaaaaatttaaaattaaagaattcttgaacaaataaaaattgtcagtaatatatttgtttgcaaccaattaggtgcccacagaaaatattaaacgtgtatctacagtatcattagcaactatagaagcgtagataaaatgctaagtattataaacaagacaaataatacaatatataaaattaatataaacttgcatcgaataaaatttttaaatcttgaagaaatttatattttaaaaatgagcatacgtttatataaacataataaaattctaaaaaatatgtaattatattgtaatcattttccattatatttaaaattacttacgtatccacatcacgtgatgcactttaaaatgatgatttataaattatgtataggttaatacctatactttatttcataaatgaacactcgctattgatcttgttagtggtatgatggtgactctatcatttttgaaagacagttcctatattctttaaatttctccttttgtcttcgtaaaaaagaaaaaaaaaaaaaaaaacctccgtttgtaaattgttattttacagtttatcctttagctaacttaattataaatatttttgtaaaaaaaatacagaataataatgttaaaaatattttaaatattataaaagataaaatagtgagatagaatgtaattatatcaagaagttttcataaatatatacgaagtattttatttaaaacatttgtacacctggcaatttttttctcacatattaatattttggcaataacgtttcattaataatttattaaaaaaatgaatattctatatgaaatttataatccatcttttttcatcacgaaggtatatcacttgaattgaatttgatcttatttcatatcaattccatgtagcattttatttatttattttatccaaatgtaccaaatagttgagggttacaatatttttaggcagttgctatatccacttcccttctttgtttattcatttcttttttcaatttgttttccaaaaaattgaataagcaaacaaggagagtgtatatagcaattgcctattcttgtgagatgtggattgagtttgaacatgcagcccatttcttattatgagtgttaaactaatagcaaacgaaagggaggaatgggtttcaatgactatatccccataaatgcggccttttaggctaaagaagcctaacgagctagtacataactctaatgctttatggattatatattctctaatgctgcatttcttaaaactaaaaggagaaggggagattcttgaatgaatttggccaagcattgtccaaaggaaaaatcctaattctatcaagaatcatggcatggacagtgctctctagactctagctaatggtgaataagtagatactttaaatgaaaaatgggtttggggtgtttcagatttcattgatgaaacagtatggatactattcttaatttattgtttgagaaatttgaaaagcttaaacttgtttatttaccaattacatatcaattcagatctcacggttacaattagcctgatccaagatcgtgagattcaaaatattaaaatacatttgtgactcttacagctgctgattttccagccgctagctcttaaccaagtaaaaaattcaagcaaaacaattagtgcaaccagcaatgtgtgtattaacacagccaatagaatgcaaaacaaaatatcttatgaaacacccaacataaacatcccgaataataaattcaattcagcacaataggaagaactatcttcattttttttaaagaaaaaggctgtaacacagattttagtaaattatactaattatcattgagatttcatgaaattacacaaacattccttaattacttttttctacccctatactaactccttttaatttttgaaaaatatatactgacatcctttctatacattaccctgaaatctaagactaattcgaatgaaaaaaacaaaaatcgagattgcaaaacaagcacagatcgtgttttgaacaatcacaaacaattataaactttaagcctcatacaatcagcacctaaactgccgtgcgtgtgtacttctctcaccttccattagatctatcgtttgggtaaaattcactcaaagatataaataatattttttttaaatggttgtaagttgttgaatttttgcaggattgaactgaaccattgtaaaattcgtctccccgttccatgggccatattatgcttatcgttttcctaagaaacttgagactttaatttcttctttattttttcttgaggtcttttggtcccagagtagtaaatgtgacatgaaattccgccgaaattatggactgtaaattgcaacaagtagcaagaatttggtcgtggtcaattatcattgattaatggtagaacattttaaaggaaaagggtgggaagatgaacatggtgggaggttggcacaaaatgtttggtattctgtcttagtaggaaatgcgttaggcatcgcagcactcaaaatttcatggcatgccaaaagatataagtttaaaacaaaacgaagtcaatccactttcttacaatttggaactttgtatggtggagtttaactttaacctctctctctctctctctctatatatatatatatatatatatttatatgtgacatttaatataagaaattagatgaataagatatttttcagtcaaaagctaaaaatcaattcttttaagatgctgaaattcatttaaaagaatgagttatcccagcatatatttgttgtatgtacatgtaacaggaatcaaactcatgatcatatatttaagagataaaattatctatcaattatgttatcaattatgttacaaattataatatttaatgtcaaattacagcacaagtgacaagttatgaagaatccttaacaacttgaattaaggcggaaaacacgtacatccagtactactacgcatcgtgtaggagacttcatcagtttctgccctttgtgatatgatcctggttcttttatgatggaaaatctgttagaaatagaactttacctcgataaatcatacaatatatttaagatagttttttttaataggcatacaataaaagatagtattaaaggttgatggtgattaccaaaatcaaactccaattttaatgagaaaacaacaatataattcttgacatactgaacttaagatttgtttattttgtcgttgtgaaacattaaaatgaaaaaaaaaggtttattagatgtttcagggttaaatatgttcttttattataaatatatcatgattttgtgtttgatgcctataaaatatttattcagattttgctccaaaacagttaataaattggcatatttaatttttaatcctccacataagatgcatggttcattagggaaagtatgaaaatgaaagaaaagaaaatatgaataattatatttgttttctttgtttgattgggcagaaagtgctttccaattaaatttcaattttcttcttctctcattttcattacatattattgattcgattattgattcgagtaaaattggaattaattttttaaataaggtctcacatgtttaagttctataaataaaaaataatgtgtttaaaaagaaaaatttataaaataactagttaaattcttccataaaaattatttgttaataaaattagtaaatactttacattcatcatgataatcctaaaaatcatatacattaataaggaattaaaaattacattatttataaataaatttattacttataatgtcattttagtttaaataaaattatcttttttagagtattcatagtttataaagactaatattaattaacataaatgataataatttatttttaattaaaatctaatttaaatcatgcacatgaatataaaataaattatatttaatagaaaaatatatattttgtatacacttattattctaaataaaaactaattattatttataccaataaatatttcatactgatattttagtaaaagaagtaagtctatagataaaaagtaatgacccttaattggcagacgcatgtggcttggtcacaatttctcggacaacgagtccagccatggtatttagtaattaataaccaaccacccattaaatgtgtgggccttccctgactcctccattataaaagcttggttcttagtcaccgaatgcactcacctccaaaacaaatctccttctttaacttagttaaactcaactcaaggaaatggctctgggaagaggcagtgcagtagttctactactttgcttcttgctgcttcactctgagatggctcgtgctgccacctacacagttggagattctgctggttggacctttaacactgtttcctggcccaaaggaaaactttttcgtgctaatgacacacttggtcagttccaattattctatctgtataagatttactattagataaattcctgggagagagattttggagaggaaagaagggaagaaaaaaatttatgtagagacatttctttgtttgcgagttttaatttttgagagaaaggatttgaggatttttaaaactcctctgaaatctttcaaagctttaaaattattgttccccctattcgagggatttttagaaggaaaagtaactaaaattattactataccagtcagtgttaataaaattactatcatatcctaatcagtgtaaaatatataatgtattaattttttaaataaggaaaaaattgtaaaaatttcttattaactttctattttcctctcttaatatatttttaactttcaaacaaggagaaagaaatttcccttattttcttccctttccttctcatcctttcccattgaatctctttcctttctctctcctcctaactctcaaacaaaggcttaagttcttttaataactactttaatttctcaatttaatttttcatttttaaccaccgacaaattaatacctcatttgttttaaagaaatttatacctcaaatctgattctaattaataaatagctaaaatatattttgttttaatttaacttgttaagttaaaaaaaaatattttggttattaaagtatttttattagactaaactgatcttttttgtcagattacatatcaacaatattaattttaactgacttgataaatactgatgtgacatagcatttaatagtttgtcacgtgtgactaaattgattacatgagtgtaataaattttttataataattaaaagtcacatataaacaagtgaagagtgtgttgcttaatttatattattaggtgaaattaatacaagtctcttaaatatgttaagagcttgttacaatgtcttccatacagtatataacacatggaagaagtttcctttttgataattcttttatctagctaacttttgaaagcatgaaatcgatacatttttgtgtatggggtgcagcttttaagtatagccctggggctcacaatgtggtggtcgtgaacaaggctggatttgatagctgcacgactccaagaggagccaaagtgtatcagtcaggggcggatcagatcaaacttggcaagggactgaactacttcatctgcaattatgttggtcattgcgagtctgggatgaaaattgccgtcaacgctggcgcctgaagttaacttgttaacttctctctactcatacatattgtattgtaatgcaaaaagtgcaccctttagggggaagttagctcctttaaataagcggatagatataggtgtgtatgtgtgctattctataaatgtcacttatctattaagaataaatgtcggcagtatgtgatatctatctctctactctaaagtgtaggtctttgcttcagaacttataacttttagtaaaatacaaactaaatcttgcttaggccactttcattttcatatacttaaataaatataattattgaattatttggtaatattttaacgattatataattatatcatttttcttagatacattagatagagagtataagtgttatataatttttttctcacttatctccattaaaagtaataactaatcttcatttgaaaatgtgagtatacataagatgaataatatcttctaacaaaatttattaataagatgagtattttttacaaaaaaaattcatatttaaaaatcaataaagatttgaaccctagaccacttgattaagaaacataagtcattactacttatgtcaaccattattgatgtttaagtgtcatatatgtcttatgtaaaaataatcataatatcatatataattattataaaaattaaaacttatcatatataaaaatttgttattaattaatagataaatgttagtcacactttttctaatactctctttttaacactttccttatgattggctaaaatttgttaaaaaaaatatcaattttggtgggtctcacttatcattcaatgtttgtctctcttgatttagatgatatctaccaaaattgataattttaaaaattttcaaacaatcacaaagagagtgtcactagcattcatataactaataagagaaaaaggttatgcacttagaatgtataaaattttacatagtcatccaatcatgactcatcatgtatggtaaatttattgacttttaaaataattatttacagtaattcaaacagtgatttatgattaaatgacaatgtaaaattattttacactttcaatgtatagccattaataatatcatcaatgacaaataaaaaatgacatatttgcaaggaccaaaataaaatattaacatatttgcagaaactaaaaaaaagtggcataattataaggactaaaatagaaaacactacatattcattaggaactaaaaacaaaaagtaatatatttgcaaaaattttaaaataaaattaacatatttatcataactaaaaacaaaaagtaacatattaacaaaaagatatttaaatattaaattaaacttaattgataaaaaaaatagcttgaaaaaagaattctgaccgtttcatgttaaatgatataggagaatgatgtacgagatacgtttctttataaataaataaaaaagataaaccttttacttatattttctttgtttttatatattaaaatgatagtaaaaatatttcaaaaaatactactatagtcttaattataagcaacataaaaagattatacttaaatataaataaattttgactactttcatactacttaatgatatcatctaaaaaatattatttaattaattgagattctattttcaataaaaaaaaacaattcttctttatatcaagttttaataaagaatactttaggaaataattatttttttaatatgattagtagagttaaatgatattaaataattttattagttagttttaattacaattaatattacttataattaaattcaaatgaaatatatattttaaacttttgtgggctaataatttaacccaacaagcccaccaattcaactcatttaacttaaaagttatataaatcaactcacataaactctcaattaaatgaaacactgttttttagactcaaacccacaatttttcaaatttatacaatcaagttgtgaattaaagttcgtatatctaactttaatgataactgaattaaaagcattatgactatagggccgggctgtaatatttttgtccctaaatcaaaagcattatgactctggcccaatccatggccttgagtcatcatttttgaggcagtagtgccccagcactctccaaccatccccattacaattggccttgagtcgtcattttttatgggtaattatttaacaagtcttattatttgctttggaaatgcacttggggtgcaccaaagtatataatgatgtgcattaagaaatattcttttttatgcaaatggttgaacctttaacaatatgggttgaccataaggaaaatgctttggagtgatatttgattcttgcacttccattattgtattttttattttttattaatattctgaaaagtccattaaatggacttttcagaatgtaataggaggtgcagaatacaataatgagaatataggatgcaatagcccttggttagtgatgcacttgtttagtatctttggatattttcttttattttttattcattttaaaaacaaggttcaaaagattagtgtaagaaacaagaaatctaggctgaaggtgaggcacaatgagccagaattacaaatttgatctatggtttgtaactttattttcatctatgggcctttgcttgggagttagagaagtttaactattgttttataattttaaattggctaaaatgtatttttggtccccctattttttacaattaataattttagttcttctaatttaaaattgagacatttagttggtatttaaaaaaattagtaattttgatctcactgtttaaattagacattgactattagttttataacattgactgtttcatgggcaaacattaactcaattagaagtagacaaaaccaatcactttctcaacaacctatctccacctttatcgattgaatctctccaacagatctagcatcttctatctagtgtgctaattgcttgcttttattatttttttttcttctaattcactttaagttgtttaattaattacatctttgtgcaattaccaactatgatatacaaatatcaaaggaaaagaaaattgttcaaagattaaaaaaagtgaagcattttctgagctctcatctaattttcactaacacaaagttggtgttgagttgaagcaggtagaaaagttccacctattaaacactccatctaattcaagcaaaacatacatatcaatcgagttagcataaaagcttattaataaatcaaatcatcttgtgttgattaagattctagacctcaacaataaattgaaatgttgtgaatcctagagaaggtttgttaaatatcattcggatccaaaataccgatatggaagcatgagccaaagaaggcgatgatgcttacacaaatgcaaatagccttttgtgtattgtctctggtagtgccatggtgcttggtgaagggagaggaaggggtggaataaagggttaataaataaataagaggttgagggacacgggtgctcatggtgcttttatggaggaagataactagggtacagaccaatcaccttcattggagatgataacaatgatggtaatgacttcgttggagatatgtttggatatagcagtcgtgttatcaaggtttgagaagggtaatgactaatgtgcagtgagaactgataaggatggtgtgaaagggttgacgggtaatttcctcaatcgtaacacgagtcggtataggttaacgttaattcttaagggttaacgactatatttggatggtgggatcaaaattactaatttttttaaaataaaaagactaaatttttcaattttaaaatagatgaactattattaattataaaaaatacgagaaccaaaaatatattttagccatttaaatttgagatgtgatatacctaagaaaatttatacaataatttgcacaacattaatttgtggttatcttcctgcatcattatgacatgtattaattaatgtgtatgagagacataaacacaaaaaaatgttaaggtacaacttgttatatgaattattatagaaataacatttcttttttaaatataaaagaaagaacatggcacatgactaaaagtatattttattcagtcttttgtggaaattatatattacttacgattcattgtcctaacttgttagtgaattcaattttcaatactatatagcatatatttggatacgcaatacattattcagaaatcattttttaaaaagtttatggaaaaaacaactctttgtttgtttgaattctccacagtgaattttggagctaaaatcattcagcaaattatccaaacatgcatacatagtttaggactaaattatcacattcttacattttcaggaacaagtgattatttctcctttttttttgaaaaaaaaaaaaacaaagtttaaataattagtgagtatacgatacttcaattcatctacattaaaaaacaacaattaaaaatcaacaaacaaaatatctttcaacagagaaaaaaaaatacataaacctacattccaatattaatcaccttatggttatgcgaaaatcacccaagaccttaattggccgtacatgattattatattagctcaacttgtaaattactaactaaactaaactcaacttagtataccgtatcgtatagtataggactaatacaaacaccgatgtgaacgagaatgacaatgaattagagagaaaaaaaaaaaaaaaaagagccccaaaatcgatctagttattattattcagaaaacccacaagatttattggcttatttctaaagattattcaaagtgaccaaataattatgtggcaaataaagaaggtaattgctatttacgatttctctttttaattatacagtactccccttattttgcttaatatactctttttttgtgcaagctcattcaattctctagagatgctcccatttgaagtggctgaactctataggaagccttgcctttcaattccatagagatgctcttgcaatgcttgaataatttcttaatgtcttcaatactcccttgcgatggccaatgtgaatatcgtggtcctcccgttcagattcaacaggaacttaatttaaaattagtaataatcaattcgcacttataatatggtaaaaaagaaatttaaaagtataaacgtttttgaatcatatatcatttttgaaaagaacacagtctttgtattaattgtgtaaaatattttttataatattattcaattacaaattgacatttttgttaagttgacttttataataattatttaaaaaaattatatttatcataatttttaattagttgataatgtaaaatattttttgctaataatgtatagaaattaaattctttttaattagctagacataaggattaaatgagatgtgtgattggatttaaatattagacaagaattaattagactcgtatgataaaaagtattaaaaaaaatcaataaatactatttttttttttttgtgaatccagaaatactcaattaaacacaagcaaaaagttgtagtccatccgtaatgaaatcgcgcgtaacataaatcaaagtggtcttaaatctaaacacagccagccaacaaccaatatgagacaaaatcataggtaattgaattgtaacaataaattaatgtgatgtttggaacggagaaaaattatgggagcattttttttcctactttgcaagacaattaataaacagacattcctcaacatttcttaagaataaatgatgaaatcaaatatatacatatatatatatatataaggaaatccatgactctaattaaagataagctgaatctgtactttaatttgaggtcatttgcaaattgctagctacctaatataaaacttgtgaacctgccgagtgcgggaccaatttataatatctttcagaacaaattggcaattgcataatcaagtaatcatttcaaactttaacataaggaacttgctgccattaatttctttcaggcctaacaaaatgcatgaaagctgaagttagtcccgccagaacaaaattaaattatatgaaatttaaagtcatgcataggaacaaagatctaggtagggttcgtaaaattttaatcattatgttagttgcattacattatagaggtacctacactattgagaaattaaaactgtttatttccgctttgaaatcctgaacactgattcgttaattgttgcatcataagatgatatatggtgactgatatgtgtcagctccaaaggacactaatagattcctccctcccattgtttacaaaagattatccaaggcaaagtatcttcaaaataaatgtagcatgcatttgccttctgttacataagagcaattcaatggtttatgcggattggcaattgtaaaatacacattcagcatttcctagacatgactaaaattccaaaagattgtctgtggggtgcattactgttcacaaaagaccaaaattttcttttttccaacagaaagccagtcaagcaaacagctctacacggatttgtgttcttatataataaggccaatggtggggaaaacaacaatatctataatcttagcttatttaaaaaagaaaatgttttatagacagctttgagatagaaagaaagataattaattgttttaattgataatgtaacgtaatatgatgagagttattgattagatatttttttaaaaaaatattatcaaaatataatctgtctttaaaaaaatgtccagaagagtgtctatttttactgtactttactcgccaataagttatttggccgtagttattttcaaatgacgtttacataaccaacttcagaaacaactaaaaagaagagttgagttctgaaaggaagattaaaaaaatagcttttgaagatggagagtttttataaatagcctatatccttacgctgattttaacttatagaaaaaatttacttaatttttttttcctttttataaatacttataaaaaaagtttattcaaatggaaacttatttttattactaaggatcaattttgttgataaatcaaaccaaacaaaacatagatttgaatgagtggtttttaatattttaggctgattagttttctttaaaaaaaaatataaaacaaggtctaatttcacttccatgactcaaactaacatcaaagttgtccaaactccaaattattcttataaaattatttgttgcggacctcaagggtgaacggcgaagtcattgggcaataggttcgatctatacaccaaatattattttactaagcaaacataattaatgggattatatatccatgacaatattagaatagcagtataaatgacttacaatatacataatatactaaacacttacggtacgtataattcacccaattattactttcaattttcaactttcaccttttcaatttttagttaatttttcaattgaatatgccaaataaagcctaaatttctcaatggccattcatatataaataattaacgttgatttttatttttctttatattgttggcgaaaatttaaatgagcctttgaacattgaaatcagaagttccacaatcttcgggaagggaatattcaattaataggtaccaacacttcccccttcccttaataaaagaatacccttcactatcactattattactattaaaagcaatgacccctacttagaggataacaacagaatggaataaatcaagatcccgcactaaagattacactgaaaagatattcaattaataggtagcagtaccatatacgagtaaaaggaattaattaaggtctatatttgaggttaacctccttctcttatagaaaataaccctcactagtactattaaaagcaatgatgggttaatttaattcaggaatataactctcactattacaacagaaggaaataaattaagaattatattcctgaatgatatttgtgattttttttttataaaatattaaaactaatttaatttatgatgttattcaatgagtaatttaaaattatgttgctaaaaaatgtttaataaattaatttcattatatttattatatatttataattttttttactacatcaaagatatgtgaatgtctcttaacttatttgatttaatattaattttgttcatgacatgtggttggtgtgagggatggatccaaggaagggcaaggacaagccttggctcccagccccctcacccctctttagatcctttgtgtaaatatgagaaaaaattaaaattaaaattaaaatattaataaaatataaaaaataggttttggagttgatatttgctaaaaaaaaagcagtagtttattctccaattttatccataaaattaataataataattttttaaaaatttgttatttataataattatttattaaaaatatttaaataattatgtaaaaaaaaattggccttccctttaatacactcttagattcgtttccaactaccgttagtctaagaaaattttccatactatttctcttgctaatagtattagacaaatattaatagaatatgatatcttccgttaactaattgaatttaaactaattttagtatagcgagcattatcattcataataattttgaataagattgtatcccgtaaataatcctgtggtttatatcataaataaattaaaacaaatttaatttaagatgtatttgttaaagtaatttaaaattattttaaaatataaaaatatattaataaattaattttaacatattaaataattaaatgtaaattaatttttatatggtaaagaaataaattaataatattttgtcattgaaagatgtatattccttacaaagtaattaattattagctaatatttattcacaaacattgcggggacaaataatttttattttccatctcatgaaaaatccttggttggtggtggtgggtgttgctgttagatacatggtcgtgcgagtgcattttgtggataagttagggtaggaattgtgtttccatttgaaaacactacaagtctacaactcataatggtggcctcagacaccattgcaaagtctaaattaattatataatgcttctaggaatccaatgctgcaaccgctacaatgggtcataaaatatttctgctagccaatggattttgaacaagtggaaacgcatgcagttatccacaacactttaggtttaattagacttgtaaaaaggtgcaacattaccatcatagccaagacaaaagtttaggacactaacaaaaaggaaagttaaatagtaaaagtatttacctattcacgtttcaagttcaagtttggaggttgacttaagttaacgctagcaaaataaaataataggtatatgatcaataagttacgcgtcagagttaatattgacttccaccctcaagatcctctttactaggaaaaataaaataaaataactaagtaccttcaaagcatagttattttcatcaagtattcttgcctcctttagtatacgtagtattttcatcatcaaagaaaagggacgtgtttctgataagtaggaacctgcaaaataaaaaccaattagactcagaccaaaattaaagataaacgtaaatgtataactcaattaacatgtgcatggtgtggaagaagataattattgagaagaaacttatgaaagggaattgagcccacaaggggtttctcggagacagattcacagagcccgtttggcctactggccacctccaactgccaccattttggggtgattctaaaacaacccatttaatattaatggaggtggacagaatgccaaaatggctatggaataaggcctctgagaaaccctagaggcaatatagagcaaagagaaagcataaggaaatttggaaattcgatctggctgagatttgaagaagagattatgggtaggttttgactaaaggaagaaataagagtggcttttgtagaaaggtgcataagcgtgcatggagttattggaatatttggccccttgggggctagcttctgttgttttcaaagactttcaatccctctgttttgtctgtagaagtttgcatatatatatatatatatatatatatatatatatatatatatatatatatatgtttagggcttgtacgtatatgacaatgatatccgcttcttatttgcaataaagacttttgtgcccttagagtgcaactctttgatgctaattatcttgcacgtggttggagatagtgaggctttctttgaccatggttgttaagttgctatttgcttgcattgtgatttcactatgctttttgacttgcttctaaaggtggatgcaaaatgggctggccatgtctcccactcagtttctaattatttaatttgtcaactcactgtttatcagttcaacctttgacgtttattgtgcatattcctataagaaaactatatatttacaacaatttaatggcttccttgaatgatcgatattatggtcagttaatttgaaaactgaatgtctctagacataataagcaaaacagcggttggtatataaaataaacatggaaagaacatgcacatttttaaaagattactttgaatatcgatcattaactgttccataatttaattattagaagtttgttttttccttactttataaatatcaaataatcattttctatcataatcactacacacttttatggagtgtaaaacatgtacattctcattcttgttattaaaaaaaaaaatcccattcttaccaatcatatgcctttgcgtctaatctttttattcattaaaagcataacattttcaagtatgaacccacatctgcaagtaatctagcacaattgtaaagattacctgtgtcgaattttgtaatttaggtaactaaaagaaataaagaatataattaaataattattatttttaaatatatatatataatatttaaatatatatttcattaattttgatgtatatcaatgaagtgttaaataaaattttttgatgtatttcattaataaaaaattaatccaattttaagtatataggggtaaaaaaattaataatctgatattcagtccaattaaaattgaaaaaatcaatccaaaaatttggaaaacaaaataaaaaatatttttttattggatcagtttgaatttgatttttgaaaatcaatccaatttaatccagccaaacaaaacttatacatgtacatatgtttttatttttaatttttttatattactcatgtttattttttgtttcttttatatttataaaattatcgcataaattatacttttttatgaaaaatgtatttaattaaagataatgttttattaactattttaatcaaggtgcataaatatatttattaagtggtgtaattttttatatttttatgaatatattagctcatcatcccctctctaaaagtgtattatatggagatcaaactccattccttctctttcaaactcttactcaactacatccattaaatttaatgatatacatttgaagagttacgctatactcttgatatacaatgacttgacttatgaatgagatatttttgtattttaaattattttttatgatcattatacaattgaatattgatttattcaaaaccgtttcatatttgaatcgagttagatcacatttaaattataaataaaaataattaattggtaaattaaaagaaattaaaaattgattgaataaaatgattttttttctttaaacgatccaatccagtatgcaaattaatacccctctagtagcattaattcaatattgctagctacttcaaaactgcatcgctcctgtcccatctgcctaagtaaaattcttcccaatacattaagttttatccttaacaagaggcttaaaaaaactatctcattgtgttcttactatatatcacaggaagataaaaggtatatgaaagctaaagagacttgtgcaaaagatcattaattagagtttgagcctttggaaagctagagagaaatatttgggaatgtgaggattaggtatactattaatcaaagttggtgggataacaatattagcatgtttggtagattaatgcaatttgaaagaaaaaaatattcataggaatcaaaaataatattagaaaatttataataattcaaacgtcattttcaactaattgaattaaatctcattgactataatttgaagaagttaattgttataacttacatttttaatatatatatatatatatatatatggaacaaaatatattaatgtactattaaaagtgttacattaattattagacgttgattctaatataatttaatggttacgactaaggatgagtatggattagattttaaagattttaattcatattcaatttatatctacttaaatggattgaatctaaaatttatatccatattttttaaaaaaaataatttgaattcaacatccaatctatttaattggatatggatttggtcatgtttaatttatattcacttaaatgttataaagatttttttttacaaattttagtaattaaacgctaaaaaataaaaacttagtacatgtccatttaagaactattttcaactaaccttagtcaaaactattttcggttgatcttgattaggatattttcggcctacctaactaggacaattttggctgacatcgacccagacatttttataccaactttagtcaggactatttttggtttgacatcgattagtgcattttcgatcgacatcggtcaaggatgttttggattgatcttagttagattattttttggttgaggttgattatgatttttagtcaatgtcgaccagtaatattttttggccgacatcgactaagggtttttcaataagcatcgactgtgactagtttttggacgacgttgcttaggatttctatggcggacattggtaaggtttttttatgatgttagttgttgatatttttttgtcaacatcagtcagaactattttttgattgacgttgactaggtttttgtactgatgctagttgaaactattttctattggcatcagctagagtttgttggccaacatcagccatgactatttcttttagttgccgttggctaaggatttttttttacattaaccatgatttttcaatcgacgtcaattgggagaatattttggtctacgtcagctaggttttttttttgccgtgtcgatcgatgatgtttttagctaatgtcagccaaaaaaatcctaatcgacgtcgaaaaaaaaaactctagctgatgtctaccaaaaagctatctaacgttgaccacaaaataatcttgacagacatcagtagaaaaactctagctgatgtagaccaaaaaatagcctcgattgatgtcggctaaaaaaactttggatgacatccgctaaaaaatagtcctaactaacgttggccgaaaaaaccttactaacattaatcgaaaaatagtcttaaccaatgatagctcaaaaacatcatcagttggcgtcggctaaaataactctaaacgacgtcgaccaaaaaatagctcctaccaaagttgaccaaaaaaacctaattgtcattgttcaaaaaaattatattggatttaaaaatccatacaaatatccaattcatatccaatctatatccaattaattggattagatttaaaataaaaaaaatagatataaaattagaccatttaaatagatttaaagtgaattaaatagaatagaatatgaattgattttatatatttgaattttttttccaatcctgcctaccatgtaactacttaaaaaaaccatgtgagtcctcctccttggtttcacattgagcctcctggtcctgcgcacacacacaaaataagactttgcggcaattacctcctgtgcctgtgcttgcagaaaattagggaagcagctattaacaattgccagttgccattactggggtataactaaattggcttggcatttatattattaaaatagttaataataacaacaatgatggattttaataaattcatcgtataacacttcaatatcctttttttcaatcataactcaatttgtgaaattgcaatattagataattttttattcaaattgatgaacatccatccttttatgagtatttgaggatctgggaatttgtgtaattgctgcacaaagattaataggaaagggttgggtttatccgtacatggtgatcccaatatttgtgtaattcatgcgcaacacacaaagcgggttttagatttaagaggcacatgttttgggatcattgcagcaagtatagcagtggttcattcatataatcattttcaaaattgtgaaatcacagcatttgatatttctttttatccaatttgagagtgccctcttttttattatttcggcgattgattgggataatgacaacaaaatatgggttttttgttcacaccccttgttgcgcagcaattacatattttctgctagtaagggatttttattcaatagaggcacaagtcctaaaaattaccgattccattcgttaatagctgccgcaaagcctcttttttttttttctttcaattgtgcgtaggaggctgaacggaaacaaaagaggatgagtcgcgtccttttttttagtagttacatcagaagcattagattatattatcgtattttattatttaaaataaatatatcatataatcatcaaatcttaaaaaaatattatataaaaattatcaattcttaaaatatctcaattatatttttatcattttgattctatcattatgactcaacttctatcaatgtgatgactattaattgtagttattgttattattattagtgatggttacaataatcatgataattataacaatagtttaagtagtggtgatgatgaataattaataataattttaataaaaaaagaagaataactttgatatgagagaggcttatagataaaagaaaagagaaaaatgtgaaaaaataagagaaaaaagatttttttttaaattaaatgataaaatatgtaaatatgtttacattaaattttgaaaaactaaagaattaataatttttttggtaaagaagatttagtattgagcttcaagggtacaccaactagtgtaaatattagcaatcacacacacacacatatatatatatagtagaagtttattaacagggatgattgctgttatcttctgcaatcatcgtcctcatttaactacattttgccctttcttctcgaggaccttcacatcacatgggtcatgggtattgcagttatggagagaaatgaataaaagaaagctttagcatgctaccctagctagtagtttgaaagtgaagaatctcgggatgttttcttaaaggaatctgaggactaaggaaattagaatagcgatacataagacagtgacatacagacatacagttgtctggcgtagcttatgtaaaatgtaaagaaacacgatcagtttctttaaacttatttattaaaataaatgtttatttaataaaataagtaacattttttaattttttagtatgtttgtcttctgcttaaaaaaacaattttatacttcttatttacttcttaaaaaaacacttatataaaaaattattattttaaagttatttttcttaagtttaaataaactctcccataaacttttaaaattatattttggctttgttgtattggtgtagttttgatattgtgagtgattttttttatattgttacaattagaaatcactttgaataccactcttaaagtaattaatacaaaagttgatagtttttattatagtaacaaataataatcaatgattgattaacttattcgaattaaattcttcttgcatggaatgccagagataggtagttttagcaattttgtacggttagagaacaacctttgggatcattttgcagtttgtggcttccctattgctggaaacaacattgaacattgttcattctttctaaggaaatcagggttataaatggaactatgctctatattgaaagtgttaccccagtggaagacaataaaatgtgctaacagatcttggttcattaagttgcttccccaccccgtgcctttttctctcttttctttgcaattgcaggtcccacgtcccatgagaaaagatgggtgatgttccattccatttcttttgaaggctggtttatagagaaaggtatcttccgtaagcttaactctagagtatgcttcttttgtgtatacaaatagcttcacatacatccatatgagtatgcaaattgaactttttttagattctttgttaggtttaagattttctgattggcgtagccaaccgcattcaattgtccacttgattattctgttacagatcgtgttattagttgcttctttttctatattgttacaagaaatgtgcttaatcctaaaacttgcaatgtgcaacattaacattaaattatcatcaattgtaaccatttgtattggttccagttcttgacaggggattgtgttacgccctcatcaaccaacgtaaacatgaatcactcacgagtcacaaaatattttgtagttgtattggttcagttgtcccactcagatgatattgtctggcctagctaggattgaaaaaaacaatacagataaaaaaattgaacttccaaggcagaaaattctttacatcatgcgttaatgcttgaggaaatcctcatctcaagtgtttaggtagaagaaaatacattaagaagcatcttctctgtttgtgtttagctcaaagaaaaccattgttgttaaaatgaattaatgattgtaacaaagagaatttcaacaacaaaaaaatgtaacaaagagaagttcttcaattgcataattggctaaggtgtgatccttaaattgaacacgtatgtcaatgggagcattaggacccaccagctctgcggtatggctttataagctttatttggtcgattacatacaacctgcttgtcttgataggaacatgctgtttgattcctgcatgcaacaagaataatcagaagaaacagtggtgaatgatatgagaaatatcatgtataattctatgatgcactcaattatagatgtcttcccattaagagaccaaacctaccttgatccacagaatatcacaacaaagtctgcttttgaacaagttattagacttgttgggtcatcaagtgcaaaactatatgctgcagggcacacttgtttgaaaattttggagtagtttgaagccaaacatgttgcagggtttccataagtccctctgcagcaatactcatcagtattgaagacgtcacacgcgctccggcaagcaataactttgtcattgtacttagaagcaagctctgaagggcagttctgcctcaaatctccatcacagccaacagtgctgcagttcccggtgccattaatagctttcactactataggcaagttgaagccatccacaaggctaacatcatagaaatcaggttcaccaagggtgaagtcagcacttgttgctggagggcttccagggccagtacaatttatgctgctgccacagccacctgtttggcactttccattgccattgtcaaagttgcagcctgttctagcccatatcctcccactccatccatcaggagcagtatatacagttgattgtcctgatttcaatgcgaagccgtcgccactgtggttgtcactgcgagttatgccgggccatattgtctccttgcagtaatttactatagtgaaatttttactgcttccacacagctcaggtgctgccaaccaacacgtcaaattagtaagcataaaagtaaatttccatctaactcaggcaaagtgttttttcaaaagtgaaggagctccttattttaagaacttaaaatttggttcaaaattccatgatgagaatttagtatgcatggcaatggcagaggattactagttaccaactatgttagtgatgaaccaagaaaaatattcagttaaaatttgatttttaatatattaatccaaataggaaaattggaagtttggaatggaagaaactctacacatagggcacttatgcaaaccaaacaaaagatgtaggactttaaaagacaaaacgtgtctttttgttattctcttattagaattggagttttatttcgataattcacataataaaagttcatataataatggtttatatattaaaggtcatcatatgttacttgataaaacttcaattccgattggaaaataacactaaaaacatttaaggaattatttctaagttttgttcagctctaaatgctcattttgcttcactaaggttggcaacaaataaagcttaaaagaatgaattacctgaggcaattacaatgaagatggaggtgagtttcagcagtgcaatgtgtggattagccatctgctaatgctctcactctgtctcttagttatgtgacatttgatgtggtgatgggttgtgttatttatgagtaagattgaagaggacaatggaagaatacgtgaggaagagagtttgtgtaaactgacagcctgaacaagcttccttgcttaatcagtcaaaaaataccttgcccgcttatgtcacactgatatcctaaaattcatacatatgttctgcacctttacgcacttttcactgatcttacaaacctttcatttttttatttattctgtttttctcttgtttcattagaatcaaatttacaatgacgctatttattcactgatttgtcctacccttgagaaaagggaggcaaaagttttgttttgtttttttaatgtaaataaagggatatgttttaattcacttggttggtcagataaaaatcgattctcaatctcacatatgcttttcctttttcaattgtttcgataaaattatgggaaaatggtgccacttgggatacacaacgatatatagtgaatgctgcagaatcacagaatagacatgaaaaaaaaaaaactaacaaattacaatatttaaaaattgactggccctgattcattagcacaaaccttgtctaatgtcttcccttggtgatgcctatcttggaaaggaacttttccagttagaacatagaatctcaaagcaaagcatagcattcaaaaactgtgcacgccggggatctatttgtttccttgggccatggctctatatgtggtccattcaatgtccacggaaaaataaaaaaagccttatcacaaagcttgtactgaacttggcaggagctttccttttagtgattttgatctttctaaattcctcaaaagggagtttctttcttctcatactttgatgactttgacactttcttttcatggattttgttggaaagaaaccatctctgtcttccttccaaactggatcatagcgattgcagaagtttaagagtaattattaggtgtacttctttccaaatttccactttaaaagtttcatgtctcactattctttcctgtacttgttgatctcatcttgatctcaccctgatgtttctgatgcagattctataggttcaattataatgggcatgtaacaagtaacgacaaaacaaagcctgatgtaaacttgactttgaaaatgcaagagatctttctcaaggactgttcaagaacattccatatgccccttcttctctacaaatctcaagagcccattaaggacagtaaaaaaaaaacgttatcagcaatggtgtttaagagtaaaacaaagagcatcccaggctttgttagaagttcatatttaattgtataagatttatctttgttagaattttatttcatatttaacttatagtctttaattcaaatctaaaactaggatttctagttttctacatattgtaattctttcttcatgaatagatgattgattaattgttgattaaagtgagagagattatgttttattatttgtgaactattctagtttatcaagtttctccgtgatgctaaaaaaaaacttatcatttagaccattcataattgattgtagtatcttcattttccaaaatttcggattaatcataggatgtggatcattaatccaatattatgcgcgtcataccaaattttatgtccattatagagcatcgagtcacagtattccataacatttggtttgactcttgttctcgttggcattaaatcaaggttttcttacaattccaattataggacgatcccaagaacatcaatccggctacaatatcaccaattcttatataagagtgcatttttcttcttcagaattttcaaattctgtatatttatctacttcattgtatcaatattggatcatcttttctttcttagggatactttgcacatttcgtggtagatccttgtacttaaccttcaaaaattaatattttggacactacaggaattcttaatatatgtattggtttgattatttctccatgaacttagtttgagaattaaagagagaggaaagacaagagtggtaagaacattagagggaaagctaaattcttgaatgtaaacatgggtggtttgagcaattctatttgcttgagtgaaacacgtaagggagtgtagtgatgtcatactctcttgctaacttcttttttcaagtaacatggtgggagacaatcttgagtatgaactcaaactaggcgcatgttgaggggcgataagagtaattcgacaagaggattggttggattgaactcttgaggaatactcacatcatacttcttggaggtgaaaagttggtgttagagatgagaacaaagactactatgataatgataataaagaaaatttagtgggaagtcttcataggaagtttgaacataatagaagaaaggaaaataaggaagatgaaaaacttgagggacataaaaatgaagatactaacgtgttttaaggtaagtctattattatgacatatcttaaaatttaaatggaaaagaaagatcgaattcatctttgagtttcataattattcccaagtcaagaaaatcaaacttagaatagtttagttttttttatgattatgtagtttcttggaggaccaaattgttgtatacaaaaggagatatataaaacttacaattaagattgggataaaatgaatgccttgatgaggaggagatttgtgcccaatcatgggcggatgcaggttagaagttggggggcagtgccccccttaaatttcaagaataattttttttatataataataaaataaagtaaaataaaaaaatagtttaaatatttgtacaagagaaaaaattgaaaagcatagaaaaagaataataaaaaagatgaaaaataagaaaggagtgagtgtggatatgtatgtttgtaacttttatgaatgcagtggctacactcttgttatttttgagcacccatcacatgttaattttgttaattttttcttttttaaattttacattttttacacctttgttataataatttgttcctttaattttcttcacaaaaaaaaaatttggaggtgccgcctccgaaccccgccactattgttcccctttatttttttttttctgcatctgcccctgtgcccaaccattactattgagacttgtaccaaaaattgcaaaatcttaccgtgggcaaccatagcatggagggggattactataaagagaggaagatagccatattggagccaatgcgaatgaagatagagcggctattatatggtgcgatattcttgaatgggttgaatagggagattgctaatgtggagattgaggagataatactcaaggtcatcacagttgagcaacatttaaaagttaggaatgatgtgtctatgatctactgaatcaggctaacgtcatcattaagaaaaaaaagttacattacatatattttggcaattaaaagaccatattaaaatttttaacaataaagagaccgaaaaagtaatttagctaaaataaactttaagaaaaaaaaaatataagtaaagcataacttaaggaaggaggcctacacctatttttcatttgaaagactcaaatacaataccttatttaagacaaacaaaactcattgctacttaaatcattaagtattaattactaattgacttcgtaacttttaagattaatcttttatggccgggactttcaagattaatctaaagcttactaaataaaatcaagaaggaaaaaaagtgtaaagtctcaacttattcattaaataccagtaattcactattcaccgtatatgaaaatttatatgaaattaggttaagctatgttacaacataattttggctacgggtatttattagacggttcgaatcggttttggttaaatttagtatttaatccaagcaaatttggttggtttagttcgatttccacaatttattttcaaactcaattcattcatgaacggtttggtttggtttggtttggaccaacacattacccatttaaatttaatttttttcttagaactactattttatattatgattctttcaaatatccaatacaattaaatcaaatgtatgaaagtagtaaaattgattcatttaataccatcaacataatattctaaaatagactaataatataaattaaaacaaaagattcttcaacaagatttactataatagtttggatcacaattattcttacaaaataatttattgcaataagctttgctataatcagatttggtgcaactagatttagtgaaacaaataaacaaaatatgattcattaatattataaacatggtaaaaaaaatatgataaaaaagtgaaacaaataacaatatacctgaaagtaatacatcaagaagttccaacactggtagtcccaacacttgcagttccaatactagtatgtttaattgttaaaaacttcatatttaagaatctaaatgacagtggcacttaattttttagtaagagtaatgttggtgaaggaaaaagatgcaacttgcgagtgtgttaggcgaagcactgtagcttctcaatcttttgagttagatgatgataaattagtacttaataatgaaacaaaataatgataaagtacaaatcatattgatttaatatttaatttgaaaaaaatacttgaaaatctattgcgaaacaaagtatatacctttatttgtggacaacatatttgcagacttggggcaacgaggttgtgcggtggtgtggtgaggtggtgttgctctatcaaaaccatgcgtctgccgacaagtaagaaaggaatactttgtaaccctaaaataaaataacaaaagagaaggaaagaaagttggcttcaatatgcagtgacgagatcaaggtgggtgacgggtttactttaactactaacaacctaagttattcaattattaatattttataaaaagtactaaagaaaactttaaccccaatagtccaacttattcaattattatcattttattaaaagtattaaagaaaataatatagtatcacatctactttgattgtcaaattatttttttagtttttaaatatatatataaataaataataaaatttatattttattatggattcacggatcaggttaacgagtcaacaaatatataaatttagattcgtgatccaatccgtatatgaacgatttagatggatttaattcgactttaaccaaaatacataaataaactcaatccaaattatttaaatctatttagatcggtttgaattcacggtcattcttacttatgaccatcctatttctggatttcaactcaatgtgaatgaaacattgaaacgcacgcgcagcagcttttgttgtataatgtatttttttaatttttattcagagaaaatatttaaatattgtgagggtatggttttcaaaattcgaaataccgaaataaaaagatgtctttctcgaactcccgctccttcttctctctctttaatctatctccaattaagagagagaaagagatttcggctatcccatccagatctttccattttcattattaggtaagcttcgtcaattctcactcccttcattctctcctcacacatcctttccattttcatttctatctagtttttttattgcacatatgtatcaattccatctgggtattactattctttatacaagtttagcttatctgttaccgacagctaaacttggttaaaattactgtttaatccatgtcttgggttttctggatgtttattttgagggagattgttgtttcagatttacggactcttccaattccgtgcttaccaaattcgtgttttttttctttcataactgcataaatgaataatctatgttgatgttgttgttgtaaccaagctgaataacatggtgtgattcatgtggtcaatctcacctagtgagataagacttttgctgttatgcttgttttcatcactgcttggtgttgattttgaaagatggtgttaaatctgtgtacacttcaacaattatctatttgattcttcattcttgctcccagctatggattctatccctgatgtcattctccaatgcatcttgtcccgaatcaccaatgctcgagacgtgtcatcttgcaattgtgtttccaggagatggaaggactccactccctacatcagaaccctctattttcctcgcagctcatttgacaccccttcttcttcttctgagggtgctgacaacatcatcaaaagaatggtgtcaagagtggtgaagttagaggagctaattgtgtatagccccttttccccagatggccttgcatcatggctctcactggcggggcaaactcttcttcaacttgagctccgaatggacaaccttgctgacaatcagggcttccatgaaagcccttccaaattggactatattggtgctgctaagaatttggagtctctgaaactgtggggtgtgttgctggtgcgttcccccaaatgggatgtgttccctaacctcaagaaccttgaaattatcggtgcaaggttggaggaccctgtgttgagtgtggtgcttcgctcatgcccggttctcaccaggttgttgctgcttgcatgtgaaggggttaggtcggtctctattgagttgccatgtttggaggagtgtaagctggatttttatgggatggggaactgttctctcactttgacttccccccaaattgagacccttgaggtacaaggctgtagctggattagggtccctgaaaccaagcatttgaggaatctttccatatccaacagtgcaggtagttaactcgttaaagtggtttttgtgtttatatatttgttgttgactgttgtctgtcagataatcatttgtgcctctacttaagtttctgggattgtttgttcatgacattgtatgagagccggatcaagttaagtgcgtgtttggtttggtgccactaaaaatggactcatgttgcttattcttgaaattatggacaaacgcacaagcaaacacactaagtggtatagacaatagagtttgatccttgccttctattgacagttcaaacccaagggctcttccttgagtggtgtattcgagatagaatatttgggattgtaggtcaatcacattgtccatctctttttgtgtccttgttttcaagtaatctccagagtttgtcttttggacaaaacttagatacatattcatatatatattttttagcattttatttgatttagaattagagttttattttgataacctatactgatctttaatgctgagatgaaaactcccgtttttattagagaataatacccaaagcatatatgtttgtccctttcttttaagtttaacttactttcctttcaatttatttgctttcagggagagtgtatatggttgattttggaaatcttttagctctggagtatctgtgtatgagaggaatccagtggtgctgggatgccatttgcaaaatgctgagattggcaagtaaggtgaaacatctctatatgaaggttgaattcactggggattatgatgcacttcaaccctttccagagattgattttgttgacttcttcaacagtcatcaaaagctacaaaagtttgatattcatggagctatgtttgcagctctatgccagaagaacagtctcaaacatgtaagttcataataattctacccttctgattgaaggtgttatttaatatttcaattcatctaatgaggatatttcacaggtggattcaggattcgtgattccgtttttggaggaggttgtgatcacagtgaggtcacctcttaatgctgaacagaaaatgagtactcttgaatcattgctgaagtacgggaaaagtcttaggagaatggttataaagattcttgagatgaagagctgccatagtagcgctgatgatttttttgacgagatttgccggttcagatatatgaaccataacatagttcgaatagaataaagctcattattatttcttgatgcttacttaatttcagacactttttctttggagctaaatatttgttaaatctttctctggtatacgattttgttgtattgattttgaacttcatttgaaaattgactcccgttttagtaaatttgcagaataaatttagcgtccatatcatgattccaaaatattgcggttgctttaaagatcctaatgatttttttaatttctgtgtttaaaggattatatattattgcattacaccattttcaattacggaagataagaacagttaaccgttgatgtgaaatgttttcatgaagagtgcatatatttttttttcgaaccaaaaaaaaaatatagtagcagccagcaggtaacgagttaaatataaacaactttaatttcttaagcttcattcacctttattctctttcctccctattatattattcatcatatttctcatattctctttattcttttctttttatcttaattttttatatctctgttacatttcataaaggatgtgaaaaatgactattgcaataagcaaggagcttatggtgattatttaagttgtctacgcattatctttaataagaacaattaaatgaattatgaataaattaaaaatcctgctttattttttttggtgtttcatataaagtgttcatttattttaaaattagatcaaattaattttgaattactaaatgtaattaaaaagtatctttatattaacttgtatcataacttttatattaaaataaaatatacacatggtgtgagaaattagcataaaactaaaaaacaggcccgcataatccgtgtcaaacaatgaaaaaaattgtattggacagcatctcatacaaattgaacttcttgacaatggatatggatgtgtttggaaggattttgtagaatctattcacatttatgaaaataaatttataattttttttaaaaaaaaaccattttattttaacaaatttattaaaataacttctttaacatattttaataagttttaagtaaataaactcttatatgataattttttattaaataagaatgttaactaaattcacacacgtctttgttttgattgttgtattatgctatgcctatatgtcgaatataagatttaaaagaatattttggtagttggacatcaagtaatcggaaataactatcatgcaaatttttattttaaataattattttaatataaaatactaaccatcttttttaagaaatgaaaacaactatatttattaaaaagaaaatcaaacacatcagttataaacttttttttagatcggttataaactaatagcgtaaccttttatttatttgcgctcctcgctaatttattttaatgctgatttcctaatctattttaaatttttcactaaataaataggtctttatttttatgaagtaacaaacaggtcttctgttttcaatactttgtttttctcctttaattagacgatttatggcttttgaagattgaatatagttaaaatctaatgtatttgtattaaaaatatctgatcaacaaagttttagattaacataaaaaaaccaaaatctctcacgtttgtttttttaacgtggtcaacaacttttcaacgagtaatagtatgtttgtgcatccgttacatctaattgactcacattctaagaggtactaactttgcttatttttcgaccgaatgctgaattaattaaaatcccttaccttgataaaccgagaattaaaacaaaaaaataaaacacacactttaactaaatgcacactacatgcgtgttttgatgcgtgtttgtgaagggcttcccctaaacacaaagcaattaacctaacagacctttacatcctcaacagcattagcaattgaaacacaaccatgattgaacataaaaaaaacaatcctccttaatgaacttaatttttatcctaccctgtagttcccaacacaaagatggtagctataacaagaacaagcaggtatgaagacccacttttacccaatcattcactaaaattctttccctcttatctgcggattttcatatcccaatcatacaagacaattcattgtagtaatcatccgtggaaaagaaatgctggaaactctacttgtggtatcaaaaatttctgtctacacttgtaaataatgttcataaaaactctttttaagttattatatgtttgctgtatcactaataaaattaaattaactaatctatataagcttcttcttctggaagtaccgcttcaaataccacaattgcaaaccagaaactgcaatgcacatagccaaggacataatgctaaaccatgccactctgccatttgttttttcactcacagtcctcatctcagcttccctgaacaaataactcaaaaaacaaaaaataagcatatgaaaagtttttaaaagattatttgcaataaacaatttacaggggaagatgttgatgtgattggaattacctgcccttaagatagagcaaattctcatggatggcctctactgctccttctagctttctcagctcaagctcgactcccttaggtatcaatcacatgtagagcaaaataagcagagagaagcattcaagagtaaaaggtttaggtatagaattcaattcagatttggatcctctcatgttatgttatgagagagaaagatacaaaagaaactatagtaatacaccattatttgtgtagggtccattaaacattctatagtgtcttttccactcataacttgaggggaacatcaaataaggaacatgagaggatccaaaatttttcaattcacaggcaattactaactgcttccagctcacagtacaaaactacttcaagcaaactacaaacctaagaagctcttaaaaactattttaaaacagtgctgaactcatttcttattataccttgagtaaatgtcagcccttgataggtagaacacttaagttctatctacctatagtataggcctatagggagattcaaaattatacgtatctcttggaagtttacctcaatcttctcttttctagcaactgaatcccaatccttggctgcaattccaattttccaatcaaggtttacattaacctcaccaactccttgactatggctatccacccagaagcacgcaaggtagttcccagcctcttgagccgtaaatgcgatactaccatgtgttgtgttctccttgtgatgaagattgtttccatatggtgatgtcacctaaaggaaacaaattactattagaaacaaagagacaagtaatagacctttataacaagctgtatcagaaggttgtcattcaagagccaaccagtattacatcctgaaaacacataaacacaagcaagtctaaacaacagaaaataaactattattacttagtagaaatgtaaaatgtttccaagtacattttttcaacattattaaaccttatttctgttaagacttgaaattttgtaaatgcagttatcatgcaagggatccattccccaggtagctgaggtatttgatagagcatcagttgataaattagtggtttttttattactgaatcacagaattcacacaatcaggaaaagggctgcagttccccagttttatgactcctatagagattattctctgtccaaacttacagaactactgcacacataacacccttctacatcacactacatacttccaacatgacagttattattacttgtatatctaatgatacataacttctcatgacagctataatttgttcccatcagtattaaagtctccaactctgccatctttgatcttggcaaaccactcagcatagcaagaatactactctgcgaaccatgctgtaagaaatttccaccattatgtgtgcaagccatattctaagatgttttcgactttccattaccaccacttctccagcagcaaattattcaatgagctcaatgacaatgaaatcggactgtctggccaagaattagaccagctgagtaagaaaacttctatcaagactatcagttaatatatatggcccacacttgtagactggcctgtgcctgtagactgaccatccaattataactgactcaccatatcacatcacagtcttgtgggttttgaaccctcaggttcagttagggccgacacaagggtaaagcaactaaagctcaagctttaggcctatataaaaaatattttctattagttttataaagcaaaaaaggccccatataatgaaaaaaatgtcatatgttaacaaaaaggcctcaaatttagctctcacgtttaaattaaaaaatgttattttaaagtttgctttaggccggccctgggtccagtatagcgagattctagattctccccatgcatgactaaggaaccattggcaccatcccctcgttacatgtgagggaggtacgatgcacgccactcccgaaaatggtgggaaccgttagagaacacactcatcaaatagctgtgatctatccgggttacaacaggtcaacatagtagaggctcgctatggttttttaagttcataccgagcattaggactcccccggggcctggcgtgtgtgttctctagcgcgaacacctagaccattcaggctccacagacatatataccaaaaaattaggagtagttttaagcaataaaaattacattcactgataaatatatgtaaaaacaaaacaaagttatgaaaattcataacattattataataccacaaaattcatggccaaaataagacaatgggataataaatacccaaagataagacctaaaattaacaattttccacaacatggtcttccaggtaatcagttgagcaagaagcacctctacaaagcctttcaaattaccaacaacacacaataattttccgaaaccgaatagtaatagcaaatccacgacaaaacaaatccgtcaacacgcaaatcaaggaaccaaacaaatcagaagacgggaaagagaatctaatgagtaattgaagaaacccatgacagaaatcgcaaaagggtgtcgtaatggacgggaaaaagagtaccttgacggcgatggaggggttgtgggcgtgatcactggggataacgacgtaatcggccaaaacaacgacgttgtgttggatttcttcggagacgcacttggtgccagcggtgggtaacgtcagccagatagccagagcggaaggaaccaaattggtcgagaagaagaagagtagcagctttaacatagctctgttccccatagcagcctctactctctctctccctctatgcacacaacacagcaaacaatcgttttctgtctctctctgcacattttggatctgtatgactgtatctatgatttttcagttttttttttttttaatggttttctttattattttattatttccacccccgtcttagtgcctctggcttaagaattaagatcatagttatgaaaagcagccgaatcattgactcagtcgaaatagtggattagtggattaggggtccaatctatggattagtaattgattcgatttaattcggtctatattaaaaaattcaaaactatatacatatacatataactaacattatttgattaagaaaaatccattcataatttcatattcaaattaataattgaagtattaaagttgataatacaagtgtattaataataaaaaaagagcgtaaatagcaacaatcaaaatcaaaacagtaaaatggaaactgcataaaacaaaaaaggggtgcaaaaaacaaaactatattatatattcatatgtcattaacatttttctattaaaaaatataaaatggaagctccagaaattaataacatgggtacaaaaagcaacaatcaggcccaaattaaaaaaaccctaataatatatatgcttatctagttgtgctgagcaacttccattctttattccatatttccgacgcttccttcttgcagctggcttctctttcttttgctgggcatagaattttttaacatctccttaattttgctgcttcattccatattggcttctcttccttctcttggttaaaaacttaattccagaaactcttttttcaaaatggtgatttttttttaacatttcagaaagatgtttttggatgcggtggcggagtaggtggagcagagcttctccagcataaggtgtcggtgaagaagacgaagaaaatgcattttttctgagttttacaaaaactggtccgggttcctgaactcgtctgggtcgccgggtttggcaaaaattggctggttcttgccgggtttaactgggtcacttacatgatcggttccacactcaatccgatccggtgctaccaacagttcccgatctgaaccggttttaataacactgattaagatgacttacttttaaatctttatcattagagtaaattacatctaaacccctatgttttgtttaaatcttatttgatactccttcctttttgtattatacaaaaaatcccttaattgtttaactcacgttgcatccacatccttccgtcctaaacaccgtttaatgaaagtagacacgtgttggtcatataacttttaatgaaattttatatttaaaatacccgtatcttcttcctctcaatttgaaaatattttaatactcttgtttttttttttgtttttttttctaattgaacgcgaacccgactttttgttagacgtaaactcaccttcttggtacgcaatgttaacaccttcctttttcaattttttagttcaattttttatctttgattgaatatgatcatttgcttcaaatttagtgttttgttcctgcatttgtgttcttgtggtcccaaatatcaacattattttaatctacactaataaacaaatgattttcagttcattcattgtgtttcttgtggtcccaaatatcaacattattttaatcaataataataaacagataattttaaatatcataatggtttcaaactggtccccattaaaatctcattcagaaataggcaacaataaataatcaaaattaaataatattcttaaaatgtaatttatatacaaggtccaatagtcatttacaagcataaccttaacggtgaagaacgtgaaacctaaattatgaaagtatttgggaggggataatttgaattttacaattaaaatataaaaataatttcacctactcacatattttaattgacattagttaacgacattaacataagagagtaaaagtaatgtgaaaaaaatgaaggatataagatgaaatttgagcaaaacattggggatgcgagtgtaatttactcttatctttattgattaaaaataatttaatacttatttattttaaagtgcaacttaacctgtcttttttttttttgtcttgattcttatttatttatttaccaatttcggtctatttgactgattttttactccattgttttataaattgtctttattggattaattttcaaaactatattttgagcacaatttaaaaattcaattttgctattttgtcttgattcttaattatttatttagaggagtgctagcaacactttctcttacttactctctttgtgattggttaaaatttattaaaaatgaaaatgtcaactcctcatttatttatttacaccattttttatctatttgactaattttttactccattatttttctaaagtgtccctattgaactaattttcaaaattatgattataaaaaaatttggaaaatctaattttattcttagttatactattttgggtctatttgagcataataaaaaataaatcatatttttttatcaacttgctaaccatgtctcaataaaaaaaaattgctactaaatattaagtataaacgtaaaaggtgactaaactggcatatttttacaaattgaaaagctaaattcatcgatttaaaaatatagagatcaatccaaaatttgctgaaaatttaaggataaaaacacatttttttccttcattatattatgtcacctttgtacttgtagtcaaatctatgtataactaaaaacttaaaatttctatttatcacttaatataaaactgtcaaacttattaagaaatacgttattttaatataaaaatcacttttgcgactatttattttaaattattcagttataatatgttaaagtaaattaagaattacataaaatgttaattaaaataaaatttataaaataattatttaaatatcgagtgatatgatatcaatactagttattagtatatgctaaaagccaatactatatactaaattgcacagtaatatttttattaagaattatttttatccattaaattcaaatattatctaaactatttaactttaattttaatatattcaattacttgttttgaattacttgttttgatgtcgtatttaaattcgatagttatgatgatcttagaagatacagtcacaagagaattaatctttcattaaccgttaactaagtagttttaatgattattttatttttcatttaactaagtaatttgtccaaaattgaatattttattttatttatataatctgaatagaattattagccgttaactaccatgcctttgattggcactcattcaattctttgaagaggttaaaagtccaataattaacccattaggttatgcttcttccttcgtgatcgtgttacttccacctcaggttatggctgtatttgtatatggatttgaaccctctctagatacctctctccttaaccgttcagtgtcactctatttctcattaatgatcttttaaaattataagattgacttcaaaatagaaaggaaaaaaaagtggattcgaataatttatattaaaaaaaactaataaatctaatgattaacatttttctaattttttttaaaaaacttcatcattcatcttatttttgcatcctgtagctctttttttttttttttttttaattttgttcagttttttttctgcctaagcagcaccgcaggaaatgatctgttttggatatatatacatagatcataatttgataatttggcattttgaatttaattagatcctattggatatataaggataacgagaacaattttattttccctatataaccaaataaattatatcactactttttgtacacttattataatttcattcatgctttgacccgatacattattgagcgtttttattttagatataatgtaaagtattagcttaagcacgatgtttatattaagagtttcatcagttttatcctgtaaaaaaaaagtttcatcagttttatttttattaaataaggcaaagtctatatcaattgaaacaagtttttctactttgacagggattgaatcacacgttactctttctagctatacttttccaatttctgtgtctgaatttttatgcacatgcatatcccaacttaggaaactgcgcattgatcaccaaagcaacattaattccaaagtttatcctagacgcagttttagttcaaacttttgtgagtactgagtaccacaataattgttaattaaaatagtaactgtatcttacttttctgtagttcatttaacaaacatttcagatggttgaattaaagtaaaaaattaatttatattagttatttaaaaattacttgaatcaaattgccggcccttagataagaaaaatcatccttcacacaaagtctgcatttagagaaagcttaaccttaacttatagatgagaagaaaagaagttccaacggctctctaagcctttttcaaagcataatgaagtctagttcattaaagaacattataattaatacaatgaggacaatttagtcctctatgtgttgtaaattttttataccatttttgattcatatggataaaaaaaaaaatacacccaaagagaataaaagatctcataattaaatcctatcttactggtttcactgtcccacaagaattttcactcagatttggttcaacatgcaggtttaggaaccacgtgaccctacggcaaattcctgccaaaacaattcttaacgttgcaaaaagccaattttttgtcctttatatgcctcaccaatgaaagttgcttcttcaattcacgctcaaaagaaaaatggaaaccctcatatcgctgttcacctttctcttagatcaagctttccaagacaaattttttatcctttcacaaccgaagaccccatgaagctatttgagttgagtcatacaacgcatggggtagctgtggaacttgagcaaaagaaagtggaagaagcagaggttaatatgctgcaacaagcagatgatcactttgactgggtcatggagagtgtcatggaagagtttagatacttagaagaagaccttgagagaatgggaagtgtagcagaaaatgctgcttctgttgcttccaagaggtgtatttgtttgagtggatctgatacaaaggcttagtacttcaggcaacttaacctgttgagcattgaacacgcactgtatttaggggtttagcccatttttttcttgttttttattacttctttggttctgatttcttgactaatttgcgagtaaacaaatatcgactatattcatgcttattgtcttttttattagtgcatgtctcttgcagatattattgttagaactttttctttcacttttcaagatttcgattttgctttgaagctgtcagcccctagcccccacaacaccagggcctctcagattatgttattcagtggatcttacgtttcccttagtaatctcattctgcttcgaatagtataattcttgatttgatgagtgtacaacggatgtgacaccttctgcaaaactatgcaatgttcaagtagatatcggaccaactaggttaatagtataataattgataatgataaattattgtctcgagaatccaactcctctttatatatatcttaatgggttaagggttcatgagctttacgtgattaccattttggttaatcaatgctttgttgttagttacaagatgatcgtatggttaattttatattagtacactactttggtgtcttaggtcttacatttggaatctgtaaaaagtaaaaaaacatatctgaaatatgtaatcaaatacactatatgtttaaggtgatttcattcttaaggcaatttaattttaaacgttttattttaattttaagttatttttatttgacgaattaggaatctatggatttatttatcatcctttatgaattgttttcctttttatacgagataagaggatataatgacgtattcgttatgtaaagtttaattgtggtcaagcttttgtattaagataggaaagatgttataattattattagattgggaaaaaaatctttaagaataatttaaggataattcctacttttttttccttcttttgtgtgattgtatttttaaagaatcttattaattcctaataaaaaaagaatcttgttaattaatatttaatagtgctttctttggttattgatcaatgggaatttatcaattaagtcattcatagttcttatggtaactaaatactatagttatagataaatctaatgttgataactgaattaatcaattttcttaataagttaaagtaacatttaggaatattagtaaaaaaaaataatatttaaaaaattaatataacagttattttggaataaattatttttctaaatgtgacttactttgagatggaggaagtaacatgtaaagttggttttattcttaattgctgaattattaaacaaaggtcagtgttacactttatttcacgaagatggcaggttgcagaatatattaatagcagcacttctgagtttcaaagggcaggacctttcaggtggaaaaaaagattaaaaaaagaaaataatttaaatgtaatttaattctttggaaattggaagtgaatacacatatttgcatcaattaatcattttcaactgtttgatgattaatctcttgaccgaatagcaggcctcttctgtaaagaaaaagaaaaaatctgaaagaattatgaaaaaaatatatctaaacggtgttggtaaaacaaaatactcttccttaagaacaattgattacaaagaagtattaaaccaaaaaggaaagataaaatatacatattcaagaagtctctggctctgggaaaacttttttctccatgaaattgatgaaacgttgagcatatgtctttggttccaccactgaaatagtcatagggtcatattgcagtgatttgcaggcatgctcaagtttctttttcactgtgtattcttgcaatatatcaattatgcccatgtataggaccacatcataaacctcaaaaagctctacctctgattcctccaccttatcctcctgaagtttccgtgttgcttgagctggcatgtttactcctaattgcactctcaacctgagtaacactccatttcatattatgacatgtgttattacaatggaacacaataaagcaaacgatttctgcttaggacttttatttaaagaaagtgacattaagtacagtgaaagaaacagaatgcacaataattgctacatgcaactgtctaggaccaaaggagatacttgcaaaggtgctagattaatgaatattgaaaaggaaacaatcagaataatgttatagacgataccttgcagtaccaggaagtaaaagatcaacttgcttgtcacctatggagtatgctctcaatgtatttcctctaatgtgtggtcccggtgcagtgttgacaaacctaggttcatgagcaactaataacaagcctttaggaataatcaactgctccccttgtttttgtgcatctagtaaagcaaagcaagtcaaaaagtgctcaatcaaaagaaggaaactgaggcacaaatgcaagaaaatagagagaacagaatcagtttgtagtgaacttgaacagttgaaataaaaacttgaatatacctgaatttacaaaataaaataaacaaaagatggagatatatcataggaacaaaagtgcactgtatgaacttctggctaataggaaggtgctagatagttcagctggtctgtttttttttcagttattggatggatgcatggaaggattagttacttaataaatcattctacctcccattttataaaccattctaatgaatgctattgctaggtgtcatctataatcactaatttttgaaagaagaatcccatatcatgttctaaaataacaccagagaaggtatttactatcttcagagggtaagccatgttgaggctgcggtagtctgggaggttccactaaggcctttagattctccggagctctaaaatgtaatcccaacagaagactgtaatcaattatgtgctgagactccaagaacatgcagtctagagaaatttgtctgcaccagaaaaaagaagtttgagtcataactagaagctaagcgtatttttgattcatagaagctaagcttattaatccttcagtcgatgagtagtccaataaaattgtcatgataaatactttatatacactcgagcaaacagtcacaaatcagttctgtaacgttccaggctaagtgtgctggtatggaagtaaatcaatcataacccagaggtgtcccagtaattgatagttaggtgaattccatttagtcattatttaatgcatgaattataacttctctattgaaaagaaaaagaaaattcactgaaagaagtggaacctttgctaacagtttcataacaaatctaatcaccctacactaattatatctaatgcaacatctctacaatggtcacattttggtttgccgattctaatgtaaagttcaggattatatcttttcaattagaaaatatgaaaaggcacaactttcatgacttctgaagttcttaacttggaaattaaccagatattgaatcagtaaaagctgtaatagctggatcaaacaagaagcttgattcagactacggataatccaatatatctttgcattactttgaaaggtcatctatttcaattatggcaagtagagatagcaaccaaccagaatttcaagcaaattagtcccataaccttatggtttcaggggatcaacgaaacactctatcacaaccatgatcaatattgtgactagtatcattaataaactaataaagtaaaattattgctgtttggtgccataagcatttcttagagcaataacagttaagaatttcctctgaaataggcattatatgatctagaagaacaggattgttatattctggaactttgtcaacaaatactccccacttgtacagaaaaataaattgcataccaatcacttttaacagaagtagctcttaaaaagtaggaactcacttgaatagggattctcgtaattttttatccatatgaaattcatattttagatcaagatctttcaatgttgtattgctattgattttatcttcgtttgtatatcttccttgagtagaccccttcagatcataacgacggtgaatatgaagttctgtgcagaacatattccccatgaccacaaagcgaacctaatgaaaacaacacccaatgaagaaagaaagaaatatttatacaaaaacaataacatccaacccttttctcactaggtggggtggaaaacaaggttattcatatctgtagtactaattgaaaagaagctagagacagatatttgttatacctttttcccacctcttagtgttattcgatggagaccaaagaattttgtaataagagtattctcataacttcctacatgatggtagtatttaggaagcatattgagcataacctacaagaagagaaaaaatatatgtacataaccacgaactatggaattgtcatttaattgggtaaatcaaattgattatttactgtgagagatggaaacataagcaaccactgatttctctgtaaaagtgacttcttaactaacataagaacattttttcaccaaaaaggcccatctaaagcgcattcttgattagccattttggcattggatttcatgaactttgcctttaaaaattgtcatcagattataggcactggtagtattattggtgtctatggaactacaagagccagaaagataagccatcacgtattctggtctagaattgtcttttcagcataaaaacgtgtttatccagaaacgtctatcataatgtggccttcactagattggatttcatgaatattgtccttgaaaatagtaatcaaattactggcactagcaagtcctactggtgttgatggattgtcaaagatacacttataagcaatcatcttttctccatataacattaaaaaatacttctctccagaaaatacccacccaaatggtctcaattagccattttggcattggatttaattaaactttgccaccagattagtggcactataaagtattacttgtatctatggggtttggtaagtggatagtaggtatatatgaaactgtatatcactctaaagtgctgtctatgtgccagccatctaatatgcttatgtatccaactacacaaaagtcgaattcacataccagttgatgaattcaacacaatatgattaatataaaaatgttttctgatccatgaagaaagaaaaaaaaaatgtcattgcaaacctttagttcatattttttcagtgtctttatcacgaatctatcatcttgagaaagaaagaagatgctgccactttttccaggtgaagatatgtcccttagaccagaatcaccacaaatggacatcatgtactctgcagcatctaatttgaacatctctctcaaattcctggaaatatatgcttatgtaattacgcaaagaaagatagaaagaaaaaaaaaagatgctagaaagctacatgtaattaataaattgggaggcatacattaatcaagcacatgaaaccttcaattcattaaatgggcaaaatgttaatctgaaaatatggggttgtttatgttgagtctgccaatgaatacatcttgaaagatcatgtgcttttaaccataacccttaagcacttctattatgccactataatcacaaattcgtattatcgagaattcatgtatattattttgataatgactatgttcacatttaaaattggacatatttccttccttcttttatgcctaaggaaaagggttggaccaaacttcaacattgatactccagtttggaagttcttcataggaaatacattatgatgcaccaatggtttcataagctaacaataaaattaagaggtgataatgctttcatgccttacaactttgaaataagttgatcctactgtagccagatggaaagcgtttcaataaacattactaaacatataactcttcaggtgtgtatgtagtaaataaataccggaataccatagggcaataatccttccagtagaagtctatagaagaatgtggaggagtcaactgggaaccctccttggggaagtacatccttatcctagctcgatctccaaaatcagatgaccgaacttcacgtgcaggcactggtgtaatttttccaacagtgtacctgagaatttggccaaatttctttaaatcaaaccttcatatgaaacaaaaatacaaaataccaaatggaataagacacattaactttgatttacaaccccccaaccaaaaaaaaaaaaaaaccttcatcatactgatgcacgatgagaatgtaatttgtttgtcattgttttctattaactatttaaacaaaaactgcggtaaaaatacaagaaatataattgggtttatggatcttaagaatgaggtgaagaggaatgccttttgatagttaccgatcaacatcggacaaaagctctacatgatttcaacagaatatataattctttcctcctcatctctctgtttttcccctctcagatcatcctgaatgactagcatccaataatcatattacagcactgacgttaatatgagtgtaaaatatactattgttaaaggcggtttaagcattcatttctgcaaactaaataacctcgcatctgccttaagaataagcttttcaatgatgactctaaaacccttgggatagtcatgtatattttcttttacttaaatgtctttacattctctacccatacccaaatatatctgtcagtattgctgcgaacaacatgaaacagatcatttataataaaatcattccttatctttaatatgtgaatcaatcagcaagtatgcatcaatacactctaatgtatgctagcttcacggaaacttgttgagtagttctcagccattacttagacgtcatctaatttattggttggatcactttctatacatggtcttgatttaaaaataacaataagtataatgcagtagaaagaattatgatattactggtgacaaatagatacaatatcaattattccaaaataagctacaaggttcatgttagatcatataatttacctgatgccaagctgcaaattaagcttcaaataatagcttcggctgcctccaaaaatatcaatccatgaactcttcttagcttgcttgacactaaacttattttgacgtttgtttttatgtggtatttctgaatagtttctaattctctccataattagaactccttgcatatattccctttcgtaaaccaaagagtttacaccagatgcctcagattgactttcattaaaagtctgtgataatgtgggtgaagagtcacgacatatgcaatctccagcaggatcttgaatgatacaatttgcatctaatgatgaagtcctgtgagatatttgacgtgaactttttgatctaccactgacagaaatcttttcagaaaaactacgcgtaaatttttgttttggagctgtatgtttctctgtattcaataacaaaccatcatcactgttaagagagcacaacttctttagagatggttgtttaccaccagcaggatagaattttccttttccatcctttaggcccttactccatgtcccaatataaagccccccatcagcaaatctataaactccagatccttgtttaagtccatttaaccaacagccgtcaaaaatatcaccattagcccacttcataacccctctgccatctattttcccacttttccaatttccaatataagtatttccattctcccaagaataccttccgcagccttcacgaattccttctttccataaaccttcatatatatctgaattggaatactcttttcgtccaatcccatgatgagcatccatcctccaactaccagtataaatgcacccagtagaatgtgtaaaggtgccatgaccatgaaggtaacccccagagaattcaccctcatactttgctcctgttggccatgtaatcagtcctttccccgtcattttcccatttacccaatcaccttcatatactgttccatctgaccatgtgtactttcctttgccatggggaagcatgcccttgattttaccaatgtaaacatccccatttgaaaaggacttttcttcaaacctacactttacaagagacagtgatatcatagtacattcaagcacaacagatgcaaaaactacataaaacacagaacacaagaggatgaatggaacagagaaggagtttctatgaatattacctttcactgtcctccatgacttgcaggttttcagtattcactgatttatgctgataactcgaagaaaggttccatttcctttaaaaggttaaatgtgccactcattgatataataaggaaattcatctctgccttcaccacctttatgacactattgtgctcctcagtgaactctgaaacaggtacaaccatcataatgaatctcaaaatgcaatagaagaaaagtcacagtaaattctttagcagatttctgcattgaaaaatgcttttcagaattttcccacaaaatacaaataacaagggaaaaaaaaaaactctcctgcttttgatgtagtacttgtttcaatgggaacaaaaagtataaattaatatactaactgcagaatttggcataatgtttagggaggaataatttcttaatgaaataaagagggaggctaacaacacataatttgtttgtttactctcacaatttgctacaactaaaaccacactacctgtatatcaacaacatataataatataattgtaaacactgcatatgctgaatcattgtaaatcctataaaatttacacctgaaaagatgtgctcattctttctagagctgtgacaacccaagaatttttccgtattccttgtcaaatgagcctataattgacatcatatcgtaactcagcaaaaaaagaaaaaagcacatactccatttgcgtactatgaataaattccctactatgaagaacgaatgaataccccatttgcattccactatctgcataaaaacaagtaactacaccgatattcttccagaaatactatctgggtcaattcaataaaagggcatccaatacaacagcagaatctgccgtttatgtgactaatccacaacacacaacaaattcctagattccaacacaacaaaaaaatcaagataagaatcactgaactaaccttagactagatatattgaagtgccaacgaacaatatcctgtgatgtgaagcaaaagaagctgaaagcaagaagaggaagatgtaaccccccacccaataatcaaaaaccagcaaaaaaaacttaagctaagcgcttttcattctaaaacagtctgagacaaagctcacgaatccttgtccaactgccttagccgacaactgccccaccaccaaaaataatttattattctatagaatagttgcaacagattatacctccagctactatatatactatgctccaataatgacacgtcacctctctctctctctctctatagacttatgcgtgtgtgtttgtgataacagtaaacttgaaaaatcaaacgaattaacttagctcttatatatgacttttctttttctgctttattaataataataactaacgaaaacataagtactaagtagtggggtgtggttgtccttggcttgccatgcaaagaagaaagatgccacttttaactcacctgaaaagctattgcgtgggcatcgtttcaagtttggaatctggacacgtacgtggcagctccttactgtgtcggaatcttatgtataaaaggaaaaaaaagaaaaacaaatacaaagaatgtgacaagtgatcaaccatgaattctgtggctttgtttcaacgtatagtaatattggattttgaggaattatgtttttaggaaattgtatctagaaatattattcatacgagtatgttggattgaaatttattaatttcagaaacaattaattttttatttaataagaaaattgaaaatagaaaaagatttgtgaaaaaatgaacgttagagaattaatttttttcatgcatgtttggttcatgtggaggaattgattttgggttaaggatttattttagatatatttttatatatttaattttatgttaaagaaaaattcaaaattaattatgagttgaaataattttaaatagtttatatattaaatctaaattttataataaattttactcataacttgattttataataaaacatccaaacatgaattatattactttaaaattaattttattgatatcatctaaacacacacaaaattgagataagtagttattataattaaaaaaaaactttcattattatggaaatgtaagcatcttttattaagaggattaaaaaataaaaatattaataatttatattgctagaatcaacaatattttataatgtttatttatatatatatatatatatatatatatacactaaacattaaaatgtgatattcttgattttactttcaaaaatagtttttatatctcgaaacaaacatataatctaagtaatttcggttattgaaaaaaaatgataactttaataatttacatgcactgagaaaaaaaattgtcgttgatacatacaagatgtctattaatattgatattttaatatatccatgattattatatatacatatatagcaatattaattactgatattacttaaaaaaattattgattttagaaaagccaaattttaattatataatattatgtgtaggtcatctaattacaacacgagaagaaataaaattgtcaatacatcacacagctgtccgtgcatgatgcaaagtagtactcacagtatctatcacgaaaaggaaaaggcccactccagtattgggcgttgaataacacaccctcttgcagaggagtttcctttcaatacacaaaaaatatattgttaatctaaagtttagagttgtttaagaaagaaaatactagatatatgtgttccttggataagttatccgttagtgagtaatagtaatcttaaaactgccatatgaagtcaatcatttataaatcaattcatcaagctttaaaaaatggtttaattattgtttaaagataacttttaaaactcaagtagttccgtgtgaaaataaattttatgttgaataacttgaattgagtcaaacataaatttaaatatcgacttcttcttttttttggctaatgctgattcatggttatattgcttaagattatctaaaatttaaggaaaaacatacatttgtaagttgataattaattaggcattattataaattttacataccgtgaactataatattttatgtgtattaatgtaaatatatatatatatatatatattatgtgtatagatacgtctttccctttaatgtaaacatttttgtatattaaattttcgatatagaacagttgtttcatgaacgttacacattattactatatatatttttggagcgttataacaaaataaaatatcacttaaaatttaacaatttttcaaatcaaattaaacaagaaaatatgtataacaatgatgaaattttatttatttataatgttctatatgttacgtagtagtcaaactattggtttaattgtttgaaaatttgaatgataaacttccttccgcttgaaaatttcttttttacgattaactggttttcaaaacgtattatgacagagtacgaactttctggaattttggtcccactttgaccccccccccccaaaaaaaaaaaaaacctacaaattagggtttcctttccctctgaaacatgtaacgtgctcagtgctcacactgtattattggcatttggcatccaatgccggtcttcctttctcaattatcacggaatcaatgtaatgaattttagattacctttctcaacttattgagagaattttcctttaatttacagaaattcacattttcttaatgatatatcaatgtcaatccaccacttgataacatagtgtaaaaagaaagaacttacatcaacataacgaaatatgaaaatgtcttattctgtcaaacttaaatatcgacatgtgagtcaacatgaatgcaaatttgaactaattatcacaggaaactttagtatataagagacaacaatagaaaattgcacatgatcatgaagaataagtgcatggagagagattcttgcccagagcgagaggtaagtggagctgttaccaaagcctgccaaacatctggaacaaataattaacattgcatttttatatagaatattttagttagtgccccaaacttcaagtcacgttggaaccaagatttaagaaaaacaaaaagaggctaatcatgtctgaatcgccttgtgacaactttatgatataattaatttattgcttgctgattcagaaagttagctatagcaagcatatataaacgtctttctttatcaacgcataataaaatcaccgcccacatagatagcatcctattcttcctcaatagacaactttgatcggatgcaaagttaacaaaaatatcttaattaattcatcactgattaacaatatcataacgtgtgtgtatgtgtcatcttattcctccacaatttatatatataactttaatagcagatgcatagataaaaaagtttgaaatattcgttaattaaaaattataaagtgataaaaattattctctccatcccaaaataagtattgtagtaggttattttacatggacaaaaataaaattattaaatataacatttattaatattatatttaaatatcaaaataacatttattaaatatattaataaaaaagaataattaatattagattgaaaagtcaaatccaatatttattttgaaataaagtttttttcctagacatttattttgggacaaaggtagtattttttattaattcactaattaataatttcaaaccaaagagtgtgcggggctgcaggtcattaatttatattgatttcatatagtttactttaaaacaattaaatttttgcattcaatggaaaaaataataataaactatggtcttaatgaaaaataagatatttgtgtcttgttttaatcagcaggtattttatgctttgtaaggatatttataaattagagaaaattgaaaaagaatttaaaagaatattaatattaaaaagataaatgacgtatatgcataactaatttacaaatatttgaaaaaattaaggttaaaactataatattcaaatgtaataaaaaaaaactaaattcaaattttaaaaggcagatatgtaattaacatgccgtttctattgataataaaagactaaaataagttactctgaagtctgaagtatgtcctctctagttagggaatatattctcccataaaaaaaatcataaactatatataaaaattgttaatagatatataatgtgaattttccataaaccttatcgtctatatatataacatagattctagtttatcattcaagggggatgggaataggattaaacatgatttttgttactaattatgaagaaagtcgtcaatgatatgcaatttcacactcgcttttaacattcttttaattatcaggtgagattgcatattaaccaccccccccccccccccccttttaacttgatttaatactttattagtagaacctatgtaaattttcaccgacaaaagagtgtggttattaaataaagtcctgcaaacatttatttcatttcactaattattattattattattattattgatttttaatattcatattaaagtcacgtaatgatattttctataaatgtgacaaataagtaaaaatgtatttttattaaaaaagtcatataaaatttataactattccttaaaaaattgataattaagtaatttaaaagtataattaatatttccaatagatacttaatttataaatagataataataaagtaataatacagtaaaaaaaagtaatattctttctttattgaatgcaaagcaacacgagtatttttctcttttaattaaaatcaaacttttggattctgtttttattagatgaacaaaagtacaaatgactaaaacgtgtttaataaatttaattattttgctttggacatgaatagaaactagaaagctcctttttgtatcgggtgagaagtgaattaaaaagctactttaacccttatttaaaattaaatgaacaaatgcgtttaattgtgttttcatatttagtttttaaaactattttataaaataggtctgaaaattaagttttagatattgggaaagagggattgataaggtatttgtaaaaaatgaatatgagtaataaaaatatgaaattagaaaacaaaaaatttaaagatgttttggtattttaatttataaactgaaaaatatacgcataaaataatttttaaaaattactcttactaaaaaaataattttctttattttaccaataaataaataaacaaaccatcctaattcttttccttttcctccccgcacatatatatgcgcaaaggagccaaattaattctaactagtgtataactttatttaaaagtagagatatttggtgctaacagattcaaggtcaacctccaatgtataatttatacttctttttcgaaaagaaattgtccctcgggccaaagattctcagctcaactgacattttgagattattgatatttgatacgtgtttttttaaaataatagtatttattacgtgtttatagttttagttcaattttgaaaaaaccaattttttttaatatcttttgagaaaattagaaaactattagtatattactgttaaagacttatttggataaatttctctaaaagcacttttaaaaacaataaaaagaatttttttataagaaaaaataagtttttcattagttaattttaaaaaattcatcgataacatttacaaatcagttaatgaaaaattcattttaatttatttcattttttttctttactagaaaaacttacacccaaataaacccaaatcagatttagcatcatcctgttgttgtattcttcctaaatgaagtagatatggtttgtcatatatagaccttatatatcgctagggcacatgaagatagatttagattcaattgtttcgtgtaataaaatattttcgtaaacaacggcgtttattgttatatacgtgttatggattgggcaagaaacataatgtgagtaatgcaccatctcaggatagagcataggaccagcttaaaatgataagtattgattaaagtcaatattcggtaaaagattcgtgaaatatatctataactagtggattatgagaactcatacttggataacaaattgtagaataacaaaacgtacaattaagatggagaaaaagagagaaatttgagttcgaaatataataaatgatagactagaagagagataaacataaaatataaactattgtataagttattatttgttttatatctcgtgaattatagatgaatttagagtaaatttatgaaaaaataagttatgcattattagagtaaaatattttacatcattatttaatcacaataaacttaataatatatgatgagaatgatgattttttatgataatttatgattgaattgaataataatataaaattattttatattaaatgtgtatgaccgttaaattcttgaatttcattttttaccaataaactctaaagttattatgtggtaaatagaataatattgcttataaattgcattccatgccataaaattacaagttccatttatctcataaaattatggaagtcaatagtcggtgatggttcttgttcggcttaaaaaaaatgcatctatgctttttgtatctgattcttcttgttccatatttatgctcatacttttgtttttcaattcattacctttcatctgattctatcaatttttttccttatcaaaatttagttgatttaagtcccaataattcaccggaaagaatatgtttcaactcatgtccattagaaatatgagtttatttcttatctaaaaaaataacctttgttgatatattgattctatcaattcaacttcaagtattaattagcaatatgtagtgggtcaattaaccttaaattatttcaatttaatcaaaaattttaaattcgaatcatgaatacttaaatgtgttaaatatttaaaggataaattttatagttcataatgattcttatccaattcaaataagattagcttcaatagaagatacacatgatttagaaaaaataaacccttcaagttgtggttgagcaacatttgagttttatcatttcttaattttctgtttattattaacaggaaagtttgtgttgctcacagatttgatagatgaccctctctcttatagaatgtttctacaatgaccaaatattagaaacagtcaacatttcacttgagtgttctaaattttagtataagaaatattttagtaatttgtattatatatatatatataataaatgtttattttatataattaaacttataataaataaatatctttaaatactaaattatatttcaaatttataatgaaaaattgaaattgtaatataaagttactttaaaatatcaataatttatttttaaaaattaataaatttcaattaagagataaaaataaacaaggataaattacaaattaggcacggtaaaaatatcacaatcaaaatgaaatattctttaaatgaagatagtataaaagaaagtttaaattatctatttgtagaagggttaaggacaaattaagatgaaatttaaattcaagatttttattttgaaaaaagagtaaaattttaagaggtggagtactttttttcttattgaatatttattttggtagattaataaaataaaatacactgtaaccttacaaaattaagttcccctaggaggccttccttttaggtcggtttgttctcaaacaaataaggtttcttattctaaatattttacttattatcaatatttcttttcacaattaaaaataaaaataaaagaaagattttaataagggtgtaaggaaaacaatggtaggttaggttttgcaaggtccaagatggacttaactctcattctttaaacttatgcacctgttataggcctcttattttatgtttattataatctatttaaatagcttaagcataaaataaattttctctttctacttttgattaaattttagttttttagttgtaatcgaccaatatgtttcttatattttaaaaaataggatttagttctcacgtgctgaccaccgaagaatcaaataaagattaaattcacttattttttttaagttagaaacaaaattgatggatttaaaactacacatgctaaaatcaatttgaccgaaagttcaaaaacatatttttacccaagtcataatatagaagccttatgtttatttttttattttttttccctttcaacaaagaccaattttatataaggtttacaaaaaggggttaacttcctacacccagccaagttctaatacacccaacacttttgtgaaaaaggcaatattacccttgtacattttgctttactttcccttgtcattcattattttcacatacaccagctgctgaatcttcttccttctcttcttcttcttccgtctgatgtgtttgttggttctggcttcttggttctagcttcgattgttgtgggttgttgggttgaggtcgttgttagcagtcgtggaggtttcgttggccgggatcgtcgtcgtcggagtcgtcagaggtaagttgtactgtttctggggacgcacattcggattggcaatctgtacgagttatacagattagcaatccgtatgggttatacggattgccaatccgtatgggttttttttttctgtttgttttgatttttgttttttttttttttaaatatttgtgttgtttttgttaaaggtattaataattaatgtatttttccttttcaattaaaataacagttaagttttgaattatgacggaattttgttttgaattaatgacaaagttgtgaaatgaatataaagatactttttgttagtgattatttgttttgaatttgtttgtttattaagatggacaacgatgattggatgcatgatgatattatggcggaagaaaataatatgggtgaagacaacagaggtgaaccgtttgcattttagaataacaactctatgattgattgttctaatgcatttaagacttcaaatgtatttatgtgataaagtagcatattgaatgtcagtaaataattaatttcatgagattgagcatgtattctgaaaagttgtaggtgtttaattctcgtgacgaggtattgcaatgggctcgtagtcttgcatctgagattgattttgtagctgtgataatgaggtatgacacagcaactggcaagaggggaaggacctcatttattttgataggttgtgaaaggagtgaaaactatagagcattcaacaaagatttagttcgcatgaccactagcagtagaaaatgcggttgtccttttaagttgcgaggaaaactcgtcataggtggcaatccgtatgagccttacggattggcaatccatatgatccttacggattgtcaatccagaagcttgatacggattccaatccttcatacggatccataatccgtccaatgcacaggatacggattaccaatccataagcatcctaaaccaaagacgaaacgacaatgcaaagcaccacttacctcgtatcgctggaaaacaatgtcgccttcgtcgccgaccaccgaccaccacaaaacctccgtccacagcccaagataccagaacgacaaccgcagagcaccaaagtcgccacaaagcaggagagcacgaggagattggaagcagaaacgaaaagcaaatgacgggtgtattagaaatttgaaaagctttggtttttattattttaagcaagggtaatattgcctttttcacaaaagtgttgggtgtattagaactttgttgggtgtaggaagttaaccccttacaaacaatacaacagacctattagcccaaataagttagtggacctatatatgtaagtatgcggaactagtgcgcttctgatttcaacatgagcattatttgtgtaggaagtaaataataataataataagaagaagaagaagaaactattaacaaggctggtctattatgcttaacaggttttttttctctctctcttctcattaattattcttaaaattaaaaaaaacaattttaaaagtattaaaaattatgttaagtaatccttccgatattaaattttttaaaatcaatcccaaaattttactaaaatatattaactaagagacaaaaataataaaacatttaattattttaaaaattactacaactgcatgtgaaagagactaataaattaactaattaaacataaatgattaatatattaaaaataagtttgaatcattcatataaaatatcaaattcaatcgtaatcatattttactttttaattgatcaactctaaattaattaatatcttttttctctttattgaagggaggatttagaagaaaaaaaattggaggataaagttagtaattattatcctctagctcaaaaagcggattctttcacctattaaaaaacataaaaatagaaacaggcatggaataaaaaaaggaaactaataattcactgagtgagtgagtcacagtgttcactcgtgactccactgagtccactctctgtctcgggcatcaacattaccatgggaacgccgtacccaactccgatctcaccctccgaaacccgaatcgggtggatcggtatcggcgtaatgggcttcgccatggcctctcgcctcctttctgctggctacaccctctctttctacgcccgcaaccctgcccaccccaacgccctctctctccaatcccaaggcgccaccctggcccaatccccggcccaactggcccaattctccgacgtcctcttcaccatggtgggccacccctccgacgtacgctccctcctcctcgactcccccgtcctcccctccctccgccccaactccgtcgccgtcgacaccaccagctcccaccccgacctcgcccgccagatcttctccgcagcacgctccctaggggcctggtccgtcgacgcccccgtctccggcggcgacatcggcgcgcgcgacggtaagctcgccatcctcgccgccggagaaaaagccgtagtcgaatggctgaaccctctgttctcgatcctcgggagagccacttacatgggccccgcagggtgcgggcagagctgcaagatcgcgaaccagatcacgattggcgcgaacttgatcgggctgagcgaggggctggtgttcgcgaagcgtgcggggctggacctgaaggagttcgtggaagccataaaagacggtgctgcgggttcgaaggcacttgaattgttcggggagaggatgattgagagggattttcgaccagggggttttgcggagtatcaggttaaggatttggggatgggggttgatgttgtggaaggaggagatgatgctgatgttgttgtcttgccaggggcttcgttgtgtaaacagttgttttctagtatggtggctaataggcaggggaagcttggcgggcaagggattatctctgtaattgagaggatcaatgggatgaatcaaccaatgaatgaatgaaattcgcagtggtgtaccaccgagcacgtggatcaattggcgtggggttggtccaacttaatcaaaggtctcgattttaagtcttggttatgcagatgtgttaaatactcgaaggtataatcctatcttactggaacaaaattgtctccggtgaaaaagaaatttgcagtggtgtgtaataaaatgccaatgtaacattgaagttagaattcttaaggtggatcgtgcatgtatgtgtgtttaattttatttagtcagtgttaactctggtttgcttctattgatggtggaggattgtctttgtatgagaagcaacatgcattttattgaattggaatagttgcaattaatgcaagcctctgtttccttgactttgtgttcacaaagtcacaacgtctttaaggcttttttatgtcacaggttaacaagatcttacttttaatagtggttaccagttatcaataaccaactccattagttggttgatgtgggactcgtgatgaaaaatgtataaaaaagaagttgatgtgatgaatgcagtgtgatcattctctggcatggagttggcttcataaatagatttaaggagaagccaagaacatctcactatgcaacaaacaaacggatactgaggtacattaaaggggcgattgatttcgggttgctattttcaaatgagatgcagtgtagaagtgtaaagattggatgtatggactttggttggtgtggagataagaatgatcaaaagaatacaacttgttgtgttttcatgtgctgcaaatgcttggatgaagtattttaaaatttcaggaaatttaaaattcagggaaattaaaatacatcaattaaaatttttgtattttcaaaattttgtgtttggataaagaaattgaattttttcatttttaaaattttgaacttcattcacggaaaaaacacgtaaggtgagtggtgtcgtgagagtagaggaggtcggagtaagttggtgatttagacggagcaaaaaattgtacatttagagcttctaaaaaagaagagaatttcaatttctcaccttttagagggaaattcaaattccacttttttagttgtttaaaattctgttttaaaattccaaaaatttaaattcctcatataaaagtattcaaacagtaaattttaaattgaagaattttaaatctcctaataaattactttccccaattaaaattctctgtccaaagtgagcgagtcactgagattcaaaatttttggatctaagtttgagagacaaactgtgtgcattgtcgacacttcaacaccctttgctactcccacggcaaggaggagggcgttgaagtggagcttgaagtgttcgccggcgagaacgatggcagaggagagggcctggagcgcaccctggaagacgcaaaagttgttgtccttgaggagatccatacatatatcgacgagcgaggtgacctcagaagaggatgggctctttctagaagcttctagaaattggtggaggcactccacacctgccatcctctccttcgtgtccttcatgcgtgatagttccagcgcttcctctatttatttcttcgatcagatctaaagaagagtgagcgagtcactgagcgagcaagtgagaaactgatgagattacgcggcacatccgtcaaattcaaagagagtggctagattgacaggggaagaagatgaaggatgaagttgaaatgaaatcaaaacttgcttatgcggttgagcatgagtccgttggtcgggttgagatcaacgtcgccgaggtcgaggtcttcgtcgtcatcgatgcatgtccatcgcgggtggcggaattttagggttctctctttaatctctatacactggtgtgagtttgagtgactgaatgagtgagtggcgagcattgtcgatttttgctagaagagaaatgaaaccaggacgattttacaaaaaatgtttgtggaacgcaactttttaagataatttttgtaaatttgtcatcattgaagtcgtaatcgaatttcagatggttcttggaaaactgtcattatttcaccgtagtagaatacaaatttttttagtagtaatatgttttaatcaagttaattataaatatttaaattttttattataataaaaggaaatgagaaacatatatgttatgtctattctaagaagcactttccgcatgtccttatcaaatatgagttttgaaccttaaattttgttacattgaaacatataagttatgtatattgtttagatgaaattatttataagaaattaagttttatatgaataaatttttccataaataattataagagaaaaaaatataaaatagaatgaattgtaatttatataagtttaaattaattatgtactatttactttttataaaaattattttcatttgatttttctaaaaagctaaggttcctaaaatagttaattaagcttatatatagagaagttaaatatatttcactttcttatttttttttcttccaaataaatgtttcataaactaaagaagcttatgaaacgtataagaaaagaaaaaaataaattaaatttctctataaattaaaataaaatttatgccttttacttttatataaactttctcaataaattcttcaaaagatgaagtggatgaattcattttaatttgtgtgagaagtctagactgattttgaaatgaagtgatttgaaataaaatttatgccttttacttttatataaactttctcaataaattcttcaaaagatgaagtgcatgaatacttttaatttattattgaaaaattcaatataaatttttatctttaacataaaaattatctaaaaatatttaactcaaaatcaattctacaatataatccactatgcaatgtaagaccatacatgtaaacattttaattataatcacttcatgaatactcttcgttcataacagaacatatataaagaattttactgctaccaaagtatatcctttaaattgaaaacaaaagcaatacaatgacatacacatcgacttcttctccatccctgtctcttgaatcaacatcaaactaaggattttcacgtagaaagataaatttagtattttctcatatgtataacatcatctgaattttacaaaacaaatacattcacacgcatgcatcatctcatgtgtcagactaacttgtaggacgtgggtgggatgagattagaggatttcttgatcttggatacgaacaactcttgaaattctgaatccacgttaagagccacttgttgaacagtagatgacaacacaccccaaattgatgcctttccagccaactcttcaaacaaaggcctacaaataatataatcaaacatttttgttagtagtactaattaatcatactgggacatactctcaaataatatataatcaaccatttttaatgttattgcatgctataaaaattattttatataaaatcccaacagcttacttagtagttgtgacaatggagtaactttccattccttcatctcctgcaatttgggtaaccacaaaaaattgtggcacaacaagtaaatcaccagccttaataacttgagtgtctaatacacgttttccattcaagcccacaatttcaatcttgccacttcctctagcaatgtaaattaactgaactgcagtgttggtagggtatgatggtgtcttaatagcaccaggttcaagtttcactctaatcacacttaacccaacatccccaataaaaggaaaatctttctccgttaaggttttgactaatccagcattttccacaacattttgtgcacgtgcagcgtctatattatagactagcttcttggtcatgttcatttgtggcttaggcattggttgacttttgtctagcttgatgatcataaccccagtttgactttttgtgagcttttcaacctcatctttgtccaagttatataatttacttgtgaggtcattagagaaacctcctataagtcctatagccccagttagaaagaaataggtgaattggccaggaacaagagcctttgaagtttccccaagaaaaagcaattataagatcagagtctccatcgttgaaccaccacgagacagctccaataggcactggtataacatctccttgcttaagcttcaaaaccacctcttctttagtgttgggaagtaccatcccaactatgccatcgctccctgcacgtgtgccataaaattaaagaaattaatttgcaattgagtcatttttcatcaaagttctatgaaaattaattaacaccgtgaatcattgaagtttattacacgattgaatacgcaatcaattaccattgcgtctcactgattcacaaagagagcgacagagaatactatttggcattaatgtagtcttaaaaaagtatatgatgcagttaattggtcactgtgtgactttgatccattgtttaattaccctatttgtagtgatatatttttaatataacttcttagtttgatcaatttcttataacttagttacgtatagtataggccatatataggggaaaaaatatagtaaagatatagacgggctctgaccttgaatgacataacctatttttgatgaatctgcataatgaggaagggcaaaggcacgaggctgaagcacaaggcgaccagcacccacattcatcttagccagaatgggcatttgagaactcgaccaagtgtagtaacctccaccatctccctcaaacactggttgtgctgtctttggcattaaatccaactccattgatttgattttccttttgttcaggaaaaatatttcagataaatgaatgcattgttgttaaaagtagttgtgctaaattatataaccaaaaatcacatgctagacgtattgaggaatcaaattagaggagtcatgaaggcaacaaattaaaccaacaaaacactaaaaggctaattatactttttgatattgtagaacttaaatttaacatgttttttaactttgagcatcaagcatgcatatcttaaaattagaaattcatatatctagtgtacgtattcaaaaagttacaagggaaagtcacgcactcatatattcctttatcttacaacaaatcaaagatccgaaaaaccatattcataataagtcttgtattgtatgtacctgtgatttagaggcgaaagacatatataaccaagactttcctcaacctgtctatcttttttatgataactagtcgaaagaaagaaactaagaaaaagcagcgaattaagaggatttagtagcatcaacgatttggccaagacatgaagacctattgagggctgtatatagatattggctcattacaattatttttgaaacttcatatactttctgtccaataagagaaaacgtataccaatgaaacaccaccaacggaatgtgggacatgcctcgtgctgacttttattgccaccttacgcatacagaaacaatttagagttgaccttttaaaacaacacgtacgcaaataatcaacctactcaaaagtcaaaatcattcaacagattggtaaaagccaaattaagtggagagctcatggggctagcttgatcgatcttgtgttgcttactcatcaaaacaattgtaaaatgattgagagcgactgctacgcgtcgaagctagaatggatggaatcagtcatcatcggaattgtgatatttgtaaattaaatccacataatatttttaaatttatttaaattgtatgttatgtaagttttatgttgatgagataagaatatattttcttactatctcattattaataatgtatctattgaataaacatatattgattaaaatattattatagattatttatgtaacaatttccatataaaatgaatattacaaaaaaaataattatgttttaactcggcacattgttttggatgttcttttaattatgtaagaatttaaatttgtcacgtggagttataattataatatgtgatattttttttaaagtaaatttgtgtttttgtttatgatttgaaataatattttgaaaagttattgatataagaagaattcttgtattagatttttgagtggataaacttcttttcaaatatttatataaaaaaacaagatttagaacaaatattttatatttatagaatagcatttttatatttaatactctttattaaataataaaaatactttaagtcaatagaataaatatataagatgtatatatataactatataaggtataaaaattattataattttgtgtttatcatttattaaaaatgctgaaaaacatttattaaaaaaaatacgagaacttcaaataaaattattgtgtaaataggttggaagccttaatttgagtctttaggatatacttgtttcaaaaatacattttataaaaaaaatataaaaatacattattttattttgaaaatttgtttaaataaagaataacaaaacaatggtatcatatttgacggtacaaaatttcaaaaattaaaactgttattggactgttgtgagttatgtcgacgagggatcgttttctatgttgtggttttgtttttctctatagtgtgctttgctttcacgtggacaaaaatgaaatgtgactatgtgagtaataatacagaaacgcctcttcgaggtctctcattcttttttatctctttttctttttctatcgtacctatgtttaaaaaataaaaaataaaaagatttttttgacattttgctaatgctagtacacacttgagagagaaagagcgaggagagagaaaagtatatatataataagtgataataatttgatagaaagaaatatagagaaaataaaaatatcaatgtttgaaatttatagatgttaaaaaataagactcatacttttctgtttttttttatccatctctataggtattaaataatataatgggcataccattttttatttgtaaattcattaagaaaagaggaatcacatttggatatatagtcttatttaccaaatctcctctcatctctttgtcatactgttaagttttttattttttatttttcggttttttacacaacgaaagtatgttatagttggtctcttaatttatttgaatcaaattgaacagtcaaccgaaattgaatcaaactattttaaaggcaggtgtattaaattggattgaaccgattcaaattaagctattaagaactgcaccaaactatttttaaggggccttttttttgtagaaaatacttttttttttgcttttaatttaaaaaataccacattgtttagtttgccttctcattttaacattgatttgtgtttgaataaataagtaatgattttttatatgattgtgatttttcaaattgctatgaacaaaatattaaagataagttttagcatttttaaaattataggtttttgaatatttatgatcaacatatttgaaaattgcttatagaggccaaacgtgaaagcaaagcacattttttaatgaatgtatggagatttacatcgagtaaccatataatgggattggacaccacatcttaacccaaaatcttaaggctcaggtttatggattttctccttacttatatggtgttaaactttttttctatttctatccgacgtgagactttaactcacacatgtactcaacataatgagagggtataggagagaatattgtatgttggagaggagcgggatttatttttccaacactgatgaatatcagtttgtgagtgcactgaattgcctttttttagcagttaagtttttaaaagatggttcagttcaatttttatttaaacagttcaattttttttttttgtttattttggttcagttaattatagttcagtgaagttcggtttgtttttgccacccctacacatagccgttgttgcgaggtaagggtttcgtcaccatcaattaatataattaaccagcatcattgtctaattaattgggaaataatttctgtagtagcaaggttattaggttttcgtgtaacatgcatttctctgttggagatatggtgaatattgaacaatgggaagtcgaaagcaacaagcttgagggaagcatagggggatttaggttgtgttaggtcgcatggaaatagagagggggaggaaggaagagagtaaaaataaggaaacgttggttgtttggaacttacaagagtggtagtgtatagggcaattttttttaagaatatgtgaacccaattaaaaaaaatagcacaaataaatctgaaattgcaatatatatataagaggactgagaagaaacaccgtttaagtttccaccatattcgattaagttaggcttttccttcctcttgtatagttataatagtaaaatattaacaataaaaataaataaatgataatgtttttttaaaatcaattaatttaaaaatgaattttcactctattttatttttaatcaaacttattttttactttatttttcttttctcacctatatattccctttcattctcttaattacttttttcctcacaacaaaacagtgtacacgcaagcctaggtatgacatactgaataaaatattatctcctataaaaattacatgtaatttaataaataaaaagaagaagaaaagaaaagaaagaaaaaaaagttcatgagtggccacaagcttcaacatttcatcctgataattaaaagttgttgtttcaatcaaagaaattgtgattgtaattagttattgggtctacgcattcatatccttccattcatttattgctcaatatagaacacttaaataagtattatcacaaaaatatttttctttaaaacaaaagcaatacaacgacataatttttagaaagataagttcgatcagaattatcttacatcaatatcatcatctgaaaattatgcataaacaaatacggtagtacgtacatcacatgcatcgaactaagcagtaggagggatgagattggtagattccttgatcttggatatgaaaaacttttgaaaatcagaatccacgttaagagacacttgttgcagtgtaggcgaaaaggcgttccaaattgatccccttccagccaattcttcaaacaatggcctgtaaataagataatcaatcattttttttttgttaattttgttaacacttaattatactgtgtcatactttaaagtaatataatcaatcatttttaatgtcattgcatgccaccatgtgctacttcttggattaaatgaatatattttgtataaattaagtcatactttatagttattacgatggagtaactctcaattccttcttcacccgcaatttcagcaacatcaaagaattgtggcacgacaagcaaatgaccagcctcaactagagtgtttaatacactctttccactaaagtccacaatttcaatcttaccacctctcctctggcaatgtaaatcaactgaaccgtaaggttggttgggtatgagggtgctaccggttgaagtttcactctaatcacacttaacccaacatccccgataaaaggaaaatctttctccgttaaggttttgactaatccagcattttccacaacattttctgggcgtgcagcatctatattatagagtagctttttggtgatgttcatttgtggcttaaggcatgggttgacttttgtctaggtttgatgatcaaaaccccaagtttggctttatgagcttttccacctcattgtccaaaccatatactttgcttgtgagctcattggagaagcctcctataagtcctagagccccagttagaaagaaataggtgaattggacaggaacaagagcctttgaagtttctccaagaaaagcaatgatgcatgagatcagagtctccatcgttgaaccaccacgagacagctccaataggcactggtataacatctcccttcttaagcttcaaaaccacctcttctttaggctttgtttgggagagggattttggagggaaagagagggaaatgaaaggtttatgtagagacattcccttgtttgggagttttaatttttgagggaaaggatttgaggattttcaaaactcctccgagatcctccaaaaccttaaaattgttgtctcccctatttgggggtttttagaaggaaaaataactaaaattattattatactagtcagtgttaataaaattattatcctaccccagtcagtataaaatatataatatattatttttttaaataaggaaaaaattgtaaaatttttttattaactctctattttcctctcttgatatatttttaactcccaaacaaggagaaaagaactttccttattttcctccatttccttccccttgaatctctttccttcccctcccctcctaactctcaaacaaagccttagtgttggggagtaccatcccaatcccatctacgccatcagtccctgcatgcatgtgtgccataaaattgagaaatttaataggagacagtgatgatcaccaaagttctaagaaaactagcaccactagccatttaagtttattacacgtacgattcaatacataataccattatattatggatgtcactaattaaaaaaggaaaaaaattaaactaattcacaacaataatgatatttttgtaatttaattgactgtttttaatgagattttttttgttaattacatatttttcgtctatatatgttcgaaaataaaatcttaattaaaaattctaagcctaattttattcaaaccaaccactggttggtatgtcataactcataagtgtgtgaatattaaattaaactcgtatgtataacttgtcatagaaatgggaggggaaattaaaatttaaaaatagaaaagatatgatgatatctacgcgcgggtctgaccttgaatgacataaccaattttggatgaatctgcataatgaggaaggacaaagccacgaggctgaagcacaaggcgacctgcaccaacattattcttagccaggagtggcactttagaacttgaccaagtgtagtaaccttgttgtgtgatttatgcgaatgtgtatacggcaagtgcactgatcgtttaacaagtaataaagtaggtaagtgagtgatcgtctccacagggattgaaaggatttttcagcaattcgaacaattgtgattaaaacagaaaacagaaaagtacgcagaagttgttgaatgattgtgttgattaaaaaggaaatttaaacaaaacagtaaatttaaacttgaaagattaccaaagagaattaattgtggtcagacaaaatctcttataagcattacctccttcaattgactgattattttaacttgaagtttacataagataaatctctcctatagttgtaaatactagataactagtaatctcaccttttaatttgatcaagaaccctaaccttctagcgattctgtcaaactaagaattcagagaatagatcctatgggttcgtgttatgattactcggagaataagtctttcctatactagttaacccctaatttcttagtgaattaaccctttaaactgaatttataacctaatgtcttagtgaaattaatcagtttaagcaatcaaagaacatattataaactccgcactcatgcatccctatgtctaagtgaagaacaagtgttattcttaacaagtcagatgttataataccaacgtgtccattgcgaattataactcccaatactcattcaaagtgatcaattctaaacaagataaaatataagcacagaaaagaattaaagtaaacacaacatatgcatttaataccagtcaatttacagaggaaaactcataagttcatggcctttccacaatgagatgattagccagccatagacttcaagaacaccaaatcataagatgaattcataattgtgcagaactttggcctgaaatcttgattcctagggcttgcaatgactaaagctctattttctcctctctctctgtccaagtatatctttttattcagaaacctcccatatatatagagtaatttaattacagtaactgaatcaaccatttttcctaatttcgaaacatatatcttttaatacaggaaagaaaatcacaaccacgcgacccgcgcgcgataccacgcgagtcgcgtgggctggcagaagaaatggcgcttgtcgcgtgaattggcagaagataaatccttattccttaaagtcttggcgcgacccgcgtggctaccgcgtttgtcgcgtgagatggcagagatgaaaaggtttaaacattgaagttccaacgcgacatacgtgagaattggcgctacccgcgtgagttggcagagaagaattcattaatcctcagagttctgacgcgacatgcgtggactcgacgcttcatacgtgatcttcttgggtcttccacgcgactcgcgcgaataatggcgcgacacgtgatactccagaatttgctttctttattatttgctcttaagtccttctctttggcctgcaaatgcttaaatgatattaaaatgcttgacataattaaaaatactaaagatgattaatttttgaactattttctaactatttaattaaaatataacctaaaattaagctagaattaagatgtgtttgcaacacatcaaacctccaccatctccctcaaacaatgcttctgttaattgtcttcggtgttaagtccaactccattgatttaatcttccctttgctcgtgatcataaagcattagtagtgtcacttattttaaagaaattgtaatgctaaataaaccactccaacacaaaaattaatttacagaagtgatagatatttaaacacttattgaaataaaattaggcattcatgagaacgtatatatttagccggtttgtttacatgtacatcataaaattataaatttcatgtcttgtgagtctataaaaacgaaaagttatactagtattgctaggttgataatctcaaagctaggcagatacatggttagttcccttaacttatacttcttaactttatgtatcatgcaattaatctaatcattaatcaatattagaaatttcatatatagtagtccaaagctataattaagatttaagactactcttgcactcaaaaagtgcacgcgcgtgcacgcgcacacacacacatatatatatatatataattaattattgtctgtttatcttacaacaaattaaatatcagaacatagagttacaaattcatagtaagtcatgtgtttacatgtgaactagaggagaaaaaatataacgaggacttccctgaatccgtctttgtatttgaagataactaatcaaagaaagaaactatgaacaagcaacgaattgaactcaacaataaggggatttaggtgcatcaacgacttggccgagacatcaaaacctagagaattaatttgtatactttctttctgatgagaagagaaaacgggtagtcacttttctcattagagaaataccaaaattctctcatttaagataagtttttaagtgcatccaaagtacgtacgtatttgtttaaatagggttgcttattttaatttgatgaatcctataatgtcacatagatttaaacactccacacataaatttattctaatattaattgtaacgccccagctacaaccgaggtcattaccacgccttaattactatcattactagataatcatcagaattaagcagtttggaagcatacataacataaaagtgacatcaacaaatgccgtcatcatatacactgtacatatagcatgatgaatatacataaagtctctgtgtcttatacaaaactgtacatcaacctccctctcaggggtacaaatataaaaccaaaggcaagtacaaaacatctgagccacaactcaggtcatttagcctatggttacacatccagctatccctgcataggcttcttgccctgggatctatctgttccgcttgatgtttctcctgcaaaacataagccccacacacggggtgagatataaaatctcagtaaactcagggcccttgaagatatttccttcccctggttcacttttcaatacaaacaaatcttcatcataatcatatcatcaagcaaacacaatatcaaattatcatccacctggccacaaccaagtgtctcaagcattacctgaccacaatcaggtcatcaagtactacctgactacaatcaggtcatcaccactacctgactacaatcaggttatattcatggcatacgccaatcatcacatccataactgatatgcagaggctacatcatagtatgtaggaacatctcctcacagggaggctacctctacatactaggcacatctcttgcatatatccctagcggaggcttcctatgaatatataggtacatctctatctcgaggcttcatctatatatcaggtacatctcctttttggtgaggctacctctatgtacataggaacatctcttatcacgaggctacctctatgtatcacaggaccatctcatcctcgaacacaatacatttgcctagggagactgcctctgtgtatatgggaacatcatcacatatcatcccctttacaaaggattcatcatacattccatgcagttatcccctcatcaaagggttcaatacacattcctacataacatgccctcttcaaagggttcaatcaacatctcaagcatatccaaccattacaggccatacatattatccccctcatcaaagggttcagctcacctgtcaaacatgtacaataaatacatataatcccctcatcaaagggttcaatccacatacttaagcatacatatgcattacaccacattccctcatcaaagggtttcattcacattcaacatatatataatcatccctcaacaaagggttcagatcacattcaatgcatacatatatagtaatccctcatcaaagggttccattcatattcacactcatgttccgcatacatacaattagtcacatcagaaccatccctccactgagggtatggcggaacacagcaaatgacatacaacaaggtccaagagcttacctgctcttcgcaaaacgctggcttccccggtctcgtggctaccaccaccaacggtatcggactcacgtcctaaaagacatacaatcacatatcaaataccattctatccgtacaatgcataaatctctagcaaaacatgcggaaaagcataaactgctgcataaaattctgcaggttttacacccacttggaaaaatcacaaatccttgtgggaggctcctaaaatcacgagaatttagaggcatcaagatatatctcttatcttttaaacaaaactggtttcatcaaaaaccatgaaccacagcctctgcagcaaaccaaaaaccagaactgtcacacactaaaatagtgctgacagcaacagaccaactcaaccagccatctttagaggacaacccacaccaggttacttgtccaaatgagctgatattttacaggcatgaatttcacatacccatctttctatagccactgaaaacactcaatttggatcatcctagaaaaagttatgctttctgcaaaatggttctctgcagcagaaaaatatgctaaaaatagagcataacagcctgttataactctgcaccacaatttctaggaaactccaaaaatagcacgaaaattccagagtgaagctaactctcttagctttcaaatggcaccaattttacaccatttggacaccgatagctcctgctatgggcaaaacaccagaactgcccaaataggtgttcttggctgccatgaacaagcatgcatgatttatgcatggaacaccatttcaacttaaaaacaacttctacccactccaaatcatactttaaaactatctcaccctcttaaaacgcagcattcaacaatctcactccaaatcctaaccctaacctcaagaatcaaggagagataggaggagatttcaaaccttagggttcagtagaccaaattggagggtagaccagcactctatgactctcaatcgcagtttagcggcgccaaacgaaaatgggcagatttgaaacccactcttctcttcaatcaccaacacccaatgctcaaaagcaacaaagaacaaagaaaatggctttcctccttgcttgttttgtgatttcagccactaatctcatggaagtggtgagaagagggcttgagagaagagaagaaccaaggaagaagaaaagaggagaaaccctcaagcagaaacgtatctgctaccttttaataagaaacagggggtgcgttcagcaattactaaatacacccatacctccgacaaagaccaaactgccctttcgtaaatccgtttaattacgcaaatatcacccgaattaccttaattaaatttagtgatattacattaatgttgtttaacttaattttatactaaaaaatgacaagcttatttggaacttgagtcaaactagatgttacaggtcaaatccgcataccacaacaacatggaggtaactatggatgccagaaatttgaaactgcctagtaattggataaatttgaaactgcctagtaattcgatacaattgtggcgtttgaatattcctcctaaaaccaaacatattttatggagaattctttggggttgtctaccttcgcgaagggtgtctcttgcccgaatatttgtcctaattgcgaatcaagtgttgaaaacgattgacatgttttctttggatgccctaaagttattacttatcagtgtttgtttggctactgagttatggcccaatattcaaatttatctgtgcaatatatggagttctcctagctcaaaaggtgaaggatattggtttcatggagacaattagttagctatcagacgttggagtcattggcattgagattgagttagattgcgagaccatcatggatgcttttcaacaaacgacgttccatccagcactgaaattgacaccattattttagcttgtaaatataggctttcttatttttcaaactatatggttagtttggtaaggaggcaagggttgagccaagttagggtctacttaagttggatattacctactttatatttttatgtccaaagtttgaatatgctacttgtcatcagcttatttttaggtctaaactttgcctttatataagctcaacttgtcccattagcctatttcatataaaaaagtgtgaaaatttattatataataataaaatcagtatgcatgaagtattaacgacttacacattattcttatgttatcaaaaattgtatgtgttggatttttatttactttttttctttaacaaaacaaaagatttttattagaaataataggacaattttaaaccatgaaatctaacatatattaaaataattaacctattcaaaacattaaaatgattcaaatcatgatatcaactttcttgccaatccaacaagatcctatattaatattaatattaatatctttgactacattctaacatatattacatttcttattatcaataaaatgaaataaattcatttttattgaaaaaacatttaattttatggatcatacaagatgttaatttatctcattcaaagaataaaaagagtggtattttacctcttaaaaaaagcataaaaagaggttaatacaatttcccctatattttacaataatccaattttagtattttccctgtaattttgggagaatttgttgaatcagcctctgtgggaaagtactgggcgggaaaatggccactaattttgttttcaatttaatcaatttcgccgttgtacttatagtctcgtctcgtatgagtcgaagcccgaattctctcgagtagaggttgcgtttgggctttggagaagaagaaaatggcggagtcgaattacgagtacccaaggctccggcggccggaaatagtcacaatcttagcgcagttgcagatcgcgaacgtgacggagcaggacttcaccaaccctaaccctgatttcatctccgatctctacactcgcgtcctcattcatctcgacattctccttgagtctctctctctctctttctattttcttctcttttcgcaccttcttcgattctacattcctctctcagattcttattcttttcattttccgcagggaagacaacgagcaactcgagttccacgctctagagcatcttgaaaaccctgatttccacgtggattccgttcgcgccgtgaaactctacaaccagatcaacgaagttctcacaacactcgagtgtccgcgcaaattcaccctcgccgatcttctcatgccggatcctcaccgaaccgatctcttccttggctctcttctcaatttttgtctcgataggtcactctcttttaacctcttggattaattattgcctcgctgagagaaaacctaaacattttaatttttttatctcagggacgcgagaatgaactccgtctcggaaattgtggaggaagtgaacgctctagaggcgcagcgaacggagttggaggagaataggattttgcaggtttgtattggaatctcatctcaatctcaatttcaaactcgttgaggttttaactgagcgtgtgttttgctgagtgtttttttttagttgaaagcggagatttcggaatgcaatgaggcgaaggagaaggagatgcctcttgttgaggaggtggaggcccaagttaaagagctcaagcaaatgattgcggtgctgaacagcaaccagagttctctaagaagtactttgaggaagttgaaggagaagaccggggaaacggatgagaaggtcagtgattgtctttggccaataatggattgacatggtgttcgttttctgctgtgacaattggaaatttatgttttaaccagattaattatattttgttggatattagtgtttcctcatttgtgtagacactggacatggctttggttttgatgagtaggtctttattcttgtgcatattacattgtggtctgaatgttgttagcactgtttttagtttggattttgagattcctttctttgtctactaactaacatcaattcccgttccttctgaaaatttgactccttgatgtatgaattatgttaattcttattcattctattttccttttcgtatcccagatttcaaatgccgaatttacattggtacaaaatgtccaagaaaatgcaaatctacgttcaaaaatcggtcaatcacctgataaagtacaggtatttttccccctcttttatatggttctcccttgtagctagcaaccctaattcatttatgttgtttatttgctcttatgttgtaggcataatcaaagttaattggttttgtttatgtttttagctacaaaaatgtggcatactttgcatttctatccaaacaatctgcttgtgtgaatattatattggagattattggactatcttccttctgttagttccacaacttgacctgatactagttttggaaaaaacattggctcattttactctgccagttcttatgtaaattttatctctgattttccttgaagagggctttagaggaaaagaaattagctcgtgaggaggcaaggaatgctgaaagattagcaatgcaagcttttcatgagaagactgcccttgttgaagttttttccaaggtacattgtcaaagactctgcttttatccccctttcatctgcattttagcctttttggtcatggtaaagtgatcttatatcatcacacatatacacaaattttccattggagattttgaattgaaattaaaaggaaaatggaaggaattgaagttttgaatttttttttgaacttcttttcttctcactttctctctctaatcaaacaaaagaaaatatgtagttatttgtatttacgttcactctattttgttttcttccaaccaaacattccatcgagatttactttaggatgcaattgcaatttgcaacataaattcgaattttgtaaagccttgagctagtgagtcttatggcacatgtatcaactgagttgtcaattagttggtgctgaagctggattgggcttatgcaagccaaatcgtcccttgaatattgactggaagatcaaatgccaatatggattgactgattgaatttgatatgcatactgtgggttcattctgtcatatctacaatacttgaataatttatgcactgattttctggacatttttttactcattatttcagaaggcaagctacaatgtaaacagctgtaactatggataaattcatgatgttttgttcttgaatttagatctttttatcttttatcttatcttaggtgtacaagaaaatgtcaaaacactacaagctgatgcaggatatacaagaacaggtattaacatactcttgttagttgacgtctgctctggtgtttatcataatgattgaaaatttactatcaattcaccatgtatactgtgacaagaagcttatttatttattttttggatggaactcacaattggaatgctgtcttagagttagagatatgagatctattatggactgatagaaattgagaaattgtaaaactgatttcattgattagaaaaatatcaagccatgttacaaaggtccttgtcaactctttatatatagagagaccaacagaacctatagttaggaacatctaacaaactaacagattgcagttgacaatttccactaagtaaaaaaccaatacattttacttagtggagtaagaaactctaacttcagtcgaatctcctttagtttatcaaaccaggccctaggagcctgtttgagaccatagatggccttctgaagcttgcacaccattgatttggtggaagattcaaaacctggagtttgctgcatatacaccttctcaagaatgccattaagaaaagcatcattcacatctaactgttgaagaggccaaccataggtggcagccaaggagaggagaagtctcactatgatgggcttgatgacaggtgagaaagtttcagtgtaatctgttccatattgctgatgaaatcccttagctaccaatctggccttgtacttgtttactgaaccatctggatttttgtaatcctgaaaatccacttacagccaataggaactctgctaggaggcaaagaaacaagtgaccaagtaccattcttaatcaatgcatcatattcagctttcatggcagctagccatgtaggatcagccaaggcttgtttggtagacttaggttccatgtgagcaagaagaagagtaggatgaattctgtgttgcacaattccagacttggatttggtttgcattgggtgagtattttgaggaatagagggaatgagtggtagttgctgtatgtcagaactgggaacagaaaaatctgcagggtacagcagtatatgattccgactcatctacatgaatagcagtagataattgagaatctggttgagtgtcaagctttggttgagtgtcaactgaaaggagaggggcaggttgacttgactgtgagtgagagacagaattttgaggtagagaagaagttgaaatttctaaggtactggctggagaagcaacagaggaagagttatgtaattgtgtgggaggtatagacacaagcgggatagtggtgataggaacatgagactctaaagaagggtgtgaagaagtagaagatgaaaatagtttaggatagggaaatttagattcattaaaaacaatatccttagagatgtaaattctgccatctgaggaaagatacttgcatcctttgtgtccaggtgaataccctagaaaagcacattcttgggacctaaactgaaacttgtttttgttgtaaggtcttaagagaggaaaacaggcacagccaaacactctaagaaagtgaaaatcaggttgctgtttgtataatttgacaaagggtatatcaaaattaagggaagaggtgggaagtctgttgataagataaacactggttaagaatgcatgatcccagtaggtaagaggaagaagagattgagctaaaagagtgagaccaagctcaactacgtgtctatgttttctctctaccacaccattttgatgatgagtgtgagggcaaataaccctatgagttacacctaattgccgtaaaaaggcagtaaaaggtctgaactctccccccagtctgtttggacagctttaataggtagacttaattgcctttcagccatagcttgaaactgtttgaaaacatttagtgtttcagactttgttttaagcagaaaaaatgaaaaatccaggtatacctagtataggcatcaacaaaagtagcataatagctataccctgtagaggaaacaaagggagctggtccccaaatgtcactgaaaattagttccagaggttgattatataagttgtgagagaacagggagagtgtaatctgtgagctttaccaagacagcatgaataacaaaaagtcaagctcagttttattgataaatgaaatcttacaaagttgcattacaattttctgaacataaacactagaatggcctaacctagagtgccaagcgcttgaattaatggattttacagcgacagaatttaaaacagaaataggaaaaatagaactaggcctgggagagcttgtcttgacagtagatgaagaacatgacagcaaacttggaaatttgtacagtccatcagaacctagatttcctttgagaagtatctcattggatacctgagatttcaccaagcaaacattaggatgaatagttatctttggcaaattgactgacactcaagttagttgacagttacatatctgtagctgttatgtactcagtttctctttgggttgaatacaatactctttcacctcaatttagttctctctcagatttactttcagtttcgtttaagtttgagagtagtttgtggactgactctgattagaaatagaattctaattctgttgcacaaaattagcctaagcagtgttaaaattaacttgagcagtgtccaaattagaaatcagaggagcagaggatgttgttgcaacatcaatggaaacaacatttttcttgtgaaatttctcaattgagactcatgtgcaagaagcacttcttcacattgcttcaaagattattaccgtgcaaaaccttgtttgatggcagttgtgccttctataggtaaattctgctaaatctattgaaaaggatcttaaagcattgaaggctaaacttagtgatgaagaaatattggagaagtcacttgaggccaaattggttgaaaaacagagtaaaggtatgttcttgtgcaagcattgccgtgtctccatttctggctacatggtttaagaatgagtaatgataatttttacgaaacacattctgtaaaacctgttcacaagtaagctgcatgatttttgtccaataattttgttgtcctttttaatagcatttggtgattgaaaaccagcacatttgtacgccacattattttttaatgatttttgttgaaaactttcatgctacatataactgctctttaagcatgaatatttgttactagcatgttttacctccaactttttcgacttgtttttccttagttgagcagatggaagaatcatggaagcaattggagaaagagtgcaatattatgcgggaagaagcaactaaatacttaagtagtacaaaatcagatgttgaatctaagagatctgttacagaaacaaggcagagaaatgtcgaggctgttttatctgaggtggcattccttaagtttcatgatatattaattatattaggtgaaagaataaattgttatttcttatctgcaaatgacaggtcgatgccataagtagtaaaattatagcagtaaaagaagctggagcagttaaagtggcactgttagcgcgcaaatgtgaagagctagttgaagcggtaaatggccatttatcctattcttgaaacctgtgtgatctaatcaacaggcttggtttaaaaatctttaaattgcacccatctcctccatgaaagaaaaattaaattttaaaagtttctaaagttagccaatacaactttcgcttgaactctactattaagtttattgtttaatttttttgacggacttgcttcaatccttgctcttagcgttataatgttggttgtaaatattgcatgatgatgcgtgttttgcttattgttataatagagaaatagttgaatttttgggtgtgaattgtcgcagtttcacaactatgcgaacccgattgcacgcgtgattgaatctgagcaaagaagactcggggccactgaaggaggtggatttggcatttctgatccggtttaatcatgtatagactactaccaaaaatcaaattatactagagtgtttatttatttatttgacccaactagagtgcatagtttagttgactacatgttagcataaaaaatctggaagaatttttgcagtggttatgcctcaatcacatcaacatcttgctgcagaattgtgtagtgcctattctgtacaccgtgtttcttctattagcccagtagttgaatcaatgtgttgtttcctgtgatggtttgctctatatgtgattatgcctctaattgaatgaaaatttgctatgcgtaatgtatcattctatttgatttttatttattgcgcttgattctatttaatttaatatattttattaattatcaaatgttcaattaattcctaaaaaaatcaaaatgttcaaacacaactttttttgcgtcctttttgtgcaattcatttggtcaaatttctctacctcatgaacttacttttttattgttttgtatttattattattttatattaaaattgaattgtacaccgtgcggagcagaataacgtgcatgtttgagacagcctattattaactatctaatccaaaatgacaaaaatggtactagcagcctggttgaacactcctcaaaatcaagcatttacatgacatcttaatctttctttttagccaacttgttaataataaatgttaataattatatattcacatattagtccgtaattgatttttttcataataataaaaaacattaaacaagtattataatgtattattagttggtaatcggatgtattttctcataataattaaaaaaaatacaaaaaaggtaataaaatgtattactgcattcctgactcctaatctacatattatataaaatttaaacattttatattattgttttgtatctctcgcttctgttttttactaaaaaaaactgtgcacgggttccaagaataaaaatcccgaacagagtagtgtttgtgggagagagagagacagagagactctgttttgttgtccattatctaatccaaaatgacaacaacggtggtgccggtggcagcagctgcaacttggttgaaccatcctccaaaccaagcattaacatggtgtctctctgtgttgccccgaaacgttgcgttttggtcccaccaccatctcgtgaaggagaagaagaagaagctcatgtcttggtcaatttgtgcccagtcctcacctttcgacctttctcctcctcccatcgaccatgacttcctggtaattttccagcacttgtaaacttccctttcttatttcttgctctccactcttctcaatagcgtcgctacagcgtcgttcgcggcgcgattcagcgtcgccggaatcgcggagtgtaacgccgctatcgcgctgcacccgtaacattccgaaaaatccctcacgttaggtttttcttgcggctattttatgaaaaaggtttttcagcctcgacctagctttgcctctcttctctccgttccggctagtttttctcttctgtccggcgactcgtgcctctttcttctaagtcatggcaacgtccctcgcaacaggaagggtctgcatcagcgtcttcccctcaacaaggggaagatgttgcatgcaacgtgaattggttgcatgaatgtgacatggaagaaatgcgggcaattcggaaccttcgaagagggaaaggacctcaaacatcaagtgagttctttttacatgctgggaatgagatgcatgaacgtgacatggaagaataagggcaatttggaatttccgaagagggaaaaggtatctaacatcaagcgaggtctttttacctgctggcaatgagtttctgtaccgtgacttgacttggatgaaatgcagtaaatttcgaatctccgaagaggtaaaaggcatctaacaactggtgaggtctctttacctgccgggaatgagttgcaacatgagatggaagatatgcgggaaatttggaatctccaaagagggaaaaggcctctaacagcaggagaggtctctttatctgcttcgaagaaggcccgaaatgccaaagtttgtaatggtgcttctgacaggaaagctagagcaatatatagtacgattcttggttacaaacgggattcctttgtaaccaatggtgctgccatgtgtttagaggtccactccttaaaaaggagttggaatacacaaagggatttcttaagagtcatgaagaagaacgagcagtgtatggatgttcagttatgttagatgcattgacggatagaatgaatagaaccttgattatttttttggtggattttccaagggggatcaatgtttgtgaggagcgttgatgcttctaggtgcatgaagactgcggtgactcaggtgagactatttgagctcttggatagttttgatgaggatattggagaaaaactgtcgtgcaagtgatcacgaacaatggagctaattttgtattagcttgtaagaattattattaattaatttcacaattttaattgttaattgttagtttgttactcattttaagtttattgatttcagtcttggggaaaattttagaaatcaagagggagcatttgttttggactccatttgcttcctattgtatagacttgatgtaacatcctttataattttatttatttatgtatacttaattattttatttcgtttattcctttaatttgtcaaatagaaatttagtagaaagaatttaaaacaaaaagtcattagataatacattcatcgcatatcattacacatagttcatacgggctttaatttacaatcccatcatcctagtgtttttatttatttacaaagtgctccacccctcactttcaaacgtagtctccattactatcttcttcgctgagcactattatggggtccgtggtaggattcggatacacgggagcaaactgaaggaagggatcatatggattaaattcttcactaaaaacagagattggaaaatgagttccgaagtagatgtgagctcggagaactggctgcatggtgtctacataacaatttctgacttcatcaaaaatttctcagtagatttatttaatgttttatcttagatggcttccatcatactgttccttgatacattggatatagcttggtacgttgctgaagtcagaaattgttatgtagtcaccatgcagccagttctccgagctcacatctacttcggagctcattttccaatctctgtttttagtaaaaaatttaatccatatgatcccttccttcagtttgctcccgtgtatccgaatcctatcacggaccccataatagtgctcagcgaagaagatagtaatggagactacgtttgaaagtgaggggtggagcactttgtaaataaataaaaacactaggatgatgggattgtaaattaaagcccgtatgaactatgtgtaatgatatgcgatgaatgtattatctaatgactttttgttttaaattctttctactaaatttctatttgacgaattaaaggaataaacgaaataaaataattaagtatacataaataaataaaattataaaggatgttacacttgatgctagaggacattgggaagatggatgaagttaaaaaggctatacgaagaggcatctatcttgttagttttatctataaccacacattggctttgaacatgatgagaaagttcacaaacaagatggaattggttagacatggagtgaaaaggtttgttacttcatttcttactttgcaaaggctgcataatcagaaaaataatcttagaagaatgttcacttcggatgaatggatgaaaactaatattgctgaaaatcatgaggtgaatagggcagctggcattgttcttatgccttcatttaggaatgatgctgtttacatccttaaggctatgcggcctattgtgcatgtgcttaggctagttaataatgagaaaaagcctgcaatgggttacatttataaagcaattgatagagccaaggagacaattcaaagttctttcaaagggaatgaagaaaagtacaaagaaatatttgcaatcattgatagaagatggaaatgtcaactcaatcatccattgcatgcagcaggtcattttctaaaacccgagttcttctacaaaaaattcaagacttgatcttgatcctgaagtgatggaaggactttataggtgcattgagaggcttagtgaaaataacaaacctgtagataagattttaagcgagttgtctacgtataaagtggcaataaggcaaaagactacagtagctcctggtaagtgcaaaactgcatttctttttttgaaatttaatttcataacaatttatttaagttagttgccctaataaataaggtgttgcactgcattacagctgactggtggaggagggattgcatactccaaatcttcaaaagcttgccattaaagtactgagcttaacttgtagttcatggggatttgagcgtaattggagtacttttgagcacatacgtcaatattagaagttttaaatatatagagttttcatacaatgattgtgaaactaacttgttttaattataatatagatttacttgaagaagagaagtaggcttgagcatcaaaagattcaagacttggtttatattaaatataaccaagcgcttaagcaacgctttgacactcgtgatgtcatcccattgtccttgatgatattgatggtagtgatgaatggttagtgggagacatgaggagatggcgaggatgctgaagatgatttggattttgattgtgacaacaacttgattgggggagatgttgccaatttagctggtgtgggtgagacttcaacatgcactaggcatcaaataaaactgaggagaggtgctgcaccttcagcagaagaattagaaattgattatgttcaagaggaggaagaggaagaaatctacagctgtaacagtagtgaaaacgataaagacggtgacttggatttagaagatgatgattgatgattcatatctagaaaacttttattttgaatacgtttagacaatttaattatttctaaccttagaggcttaaaccttagtggatagtggttaccaattaccatgacttttgttggtattttcttgtatgttttgtgtaagacacctatgaatttttattgttaattatgaatgtcatgaattttgagtaatttttttatctgttttgagaatttatatggatatacattatataaactgtaaaaaaatccagaatagtgaccacgctgctatagcatttttagaaatagccactatgcgctgttatttgtgattgataacttatggcagtagagaactcgattttacaatttttttaaagaaaaaacagataattttgcttttaaaaggcttcctaattgtaaaaggctttcaatttagtctctatttgtataatatatttcaatgttgttcttgctgtttgttgccacttcatactgagactggtatggatttacgaataagtttacctaggaattgagttgaaaatgattgtcactacaaaaaaatagagtatttctgatccctacattttttatttggttctacactacattgagttatccctccgacagacaatatcatatcaacaacagacagtgattactaaatttaaaggatatgtgtagggactgaattgaaagtttgtcatataagaaccaaattaaaatgagtgtaacatataaggactaaaaatatattatgactcttgttttttggaatacccttatgatattgcttgagaagagaaatcaggtggctaagtgcaatttttttactgtcaaattattaattttactcattgcaggatactatcaaaactgcaggcgcagagatttctggtgaagggatcattgagacatttcataatgatgatgaagcgctggctgctgtggacaacggggttgtggtatgtaatttatttattgtttttttttttttacgcctgtagcttaatgtgctttcttgttatctctgcttgaacaacttcatttggtagaaacaatataaaccacaagaatcaatgcatgttttaattgtttgcttctttgaattgatttatttatggttctagagatgcttcgccttatagtccaaacaaaatatggtaaatcttcactgcttatttcgttggctcttaattctctttgactttggtggttcactttgatgctccctctaaaaaaaggtgtactgtactatttgttttttgaaattgcagtagactttatatcatatgctacaattaaatagtaaaagatacaggcttggtattattttttgaaattgaagactttatgtcaagtgttacacattgagtaatagaagttgcgaacttataaaatttcctggtttgagttataaaagttacaaactcataaaaattacagactttaatttttcaacctgtaacttctattacttactctggaacttcttttattcagtctgtaattttaaaaaaatagaagtagtacagtaaatgtgaactaacctacatgtcttttgtggacttggattagctcaaggttgtagattattgaattgtaattctagagtttctacaaaaatattatgtgatagcttgctatcaagtttttgtaaaagctaatacaaatttgaagtcttataattgcatgcttaccaatttataaaggtatattaatatattgttagataatgtaggatttatttgtttgcttaaattaattctttatgacatctgatggcataggttgtggatctttcacacttcggtcggataagaggtacttgcttttcttaggctattaagagttggtccttgacatatttcaatgttttcttaattttacatgcaaatgttttgcctcacctgaaccaaagtcagtggagaagatcgcattcagttccttcacaaccagagtactgcaaacttcgaatctctacacgaaggacaagtatgtattgaaagaaagtagcattgtttctacatttatatgttattggcaagttcttgtcaattcttttttatatttcatattataatacaggattaagtaattggatctctaactgaaatccttagggatgtgacactgtttttgtaacaccaacagctcgaacaatagatatcgcacatgcatggctcatggtgattttcttttcttatccttctcacaaaattcatttgtttgtcttttctacaatataattaattatcatgcagctgaccactttctcttgttggtttttgatagaaaaatgcgataacattagtggtttcaccagagacctgtacaaccattactgaaatgctgaacaagtaggtagtttcttgttagttgtgatgtaaggatttaccaacagaagtaaaactaaaaggataaagagagaaaccaaatagttttctttcctatgaatattatcaaatacatgaactaaatcttttacatgtaatgattttaaggtacatattttttgctgataaggtagagattcaagacataactaagcaaaccagtttttttgttttggtgggacccaaaagtggccaagtaagttacataattatacctattttgtgttgagaatgacagagttggtaattttcagtataatgaatgggcaggtgatggagaacttgaaccttggtgatcttgtcggaaaaccatatggcacacatctacattttaatgtaagctggatgaaactggcttttttgaagtatgtgttctaattaccagttgtctttttcatcaccggtttctctctacaagatacaactggtcatgtgtatttgatgatgactgcatgggtttatgcctttatttatttattttgtccaaaaacaacttacatgatcaatcatgtcttatttgctagttttaagcttcatgtatttgtttctcactgataactttctttctgtcagaaatgcatattttggttgtttaacgagcatatatttttgtaattgcaacttttgtttttggcaacaagttcccctggattgtggttgcatcttttacataacttcaaaatttagaatgtgttgaaaaggagtgctaacaacatctctcttattggttaaaatttatggaaaactgatagacactggttcagaatttaggaacgaaaagaattattattgctgaagaatgtgtttacagagctgctgtgatgagtattcgaggtactcatgcctcccaattacaatctcgataattcccccccactaccctgtttccgtatctgtatactaacccccccactaactgtctaacaattcagttagttattactaactatattgtgctaattgtccctccttttgtacacctgcccccacctcctaatcctactcctatcaataccccctccttcaagattgaccttgtcctcaaggtctaaatgagggaaaatctttttcatctcttcagccatttcccagctatcctcttcatgtggtaagtcctgccacttaattaggacttcttctctgccatctgctgcagtccttttctgcattattttttccggataaacctgtaattcccattcttcatttaaggccactggtaaagcttgtggagaacaactgggtttgatagccttctttaacaaggatacatgaaatactgggtgtattctgcttccaactggtaactccagctgataagccacctctcctatcctatgcagtacttgatatggtccatagtacctaggacttaatttttcatttagcttcttagctaatgatctcattcgatagggttgcaatttcagaaaaacccaatcaccttcctgcagtactacctccttcctgtgcttgttggcatattttctcatttgatcttgggctttcagtaaattgctcctcaattcttgcaacagctcatctctgtctctgctcaatctgttcacttcttccagctttgaaggactgtctccactcttaattaacaatggtgggtcctgtccatataatgctttaaatggagacatcctggcagatatattgaagttagtgttgaaccaaaattcagcccaagccaattgtttaacccactgtttgggtttggacccagtcaagcaccttagatatgcttccaaacacctattagcaacttcagactgcccatctgtttgtggatgataggcagtactcatttttaactgggttcctacttgtttgaatatttctttccaaaagaggctcataaacagcctatctctgtcagatacaatagattctggaaacccatgaagctttacaacctctctaatgaataagtcagcaacttctttggctgtataaggatgactcaatgcaaagaagtgagcatacttggttaatctgtcaattactaccaagatagtatcctttccttcagcttttggcagccctccaataaaatccatggatatgtcagtccataccctggttggtacaggtaagagttgtaacagaccagctggagatagggtactagctttattcctctgacaaatttcacatcctgccacatattctcttatagttttcttcattcccttccaaaatactacattagcaattcttttaaatgttctaaaaaatccagagtgtcctcccacaacagaatcatgtaaatctttcaacaaaagaggaattctagcagaattttttgacaaaactaatctgccattaaaatatagtttaccgccttttatagcataccctgccttctctgctgtcttagtcaaaattccctgataaattgcctgcaggtctggatcagcctttaattcttcctcccaatctccccattcatcttcttgtactcttgaaatagcatgaaaagcaaactgtctagataaagcatcagccacaatattttctcttcctggcctaaactgaatctcaaagctgtaaccaatcagtttagtggcccacttaaattgatcctcactcaataatctttgttcatttaaaaatttcaaactcctttgatcagttcttataataaattttttccccaaaatgtagtgtctccattttttcactgctagaacgacagccatgagttccctctcatacactgatttctgcttgcttctttctgacagtgccttactccaaaaggctaacggcttatcttcttgtagtaacactgctcctagcccagttcctgaggcatcagtttccaggataaacattttagaaaaatcaggtaccattaataaaggtaactgcttcattgcttccttcagttgaacaaaagccatggtagattccgcattccatttaaaagcatcttttttcagcaatgcattcaaaggctgtgctagcttcccatagcctctcacaaacctcctataatatcctgtcaatcccaagaaacctctcaacccttttacatctttgggaataggccagttagacatggcctctaatttgctgggatcagcttcaaccccctggcctgaaataatgtgacctaaatactctagggattcttggccaaaacaacacttctttttattcaccttcaattcctgctgcagtaacatttgcaatactgctcgtacatgcatattatgatcttctatagactgactatacaccagaatatcatcaaaaaatactaacacaaatctccttaaaaaaggcctgagtacctcgttcataagagcttggaaggtagatggtgcattggttaacccaaagggcataaccaagaattcatagtgtccctcatgagtcctgaaagctgtcttgtgaatgtcctcctccttcatcctgatttggtgatatcctgcccttaaatccagcttggtaaaccacttagctccccctatctcatccagtaattcctcaatgactggtatagggaatttatccaggccctgtgatcttatttaaagctctgtaatctacacaaaaccgccagcttccatctttctttttaactaaaatcacaggactagcaaatggactagtactgggccttataatacccacagacaacatttcccctaccaatctttctatttcatccttctggtaatgagggtacttatagggcctcaaattagggattttatttcctggttgaatgttcacagcatgatccttttctctgctaggtggcaacccctgaggttcttgaaacacttgttcaaattccctcaatgtctgttccatcactttaggaatgtttcctttccgttcttcttgtttcatggatttcaactcaaccacatacccctgatcctcctctttccatgctctttttatcaatttcagactgattgcagcttttatcaattctggatcagccttaagagtcacccttttgtcctgcaccttgacagttaaagtcaacttatcaaagttagcttctaattcacccaatccagccagccactccactcccaacaccacatcagctcctcccaattcaaaaagttagcaatcctggatgatctgcatttcctgtagaactatgggcagagctttacaaactcctttacaccttatcttatgcccatcccctacctccaccgaatatgggcttgtcggggtcacttccaaacccaattcctctaccaattttctggaaatgaagttatgggttgccccacaatcaatcaacacaattaccattttgttttttatgctaccccacagcttcaatgatttcttggtggtaaatccttcaatgctgtgtaatgacagttgatgtaactcatgcttatcttcttcctcctcctctttttcctcctctgtgtcttcctcttcctccattaacatcaccctcaactgcttatttttacaaacatgattgggatgatatttctcctcacatgtaaagcattcccctttcttcatcttctcacttacctctaatggagacaacctcttgaatggccttcttcccttccattcattctcccctcccctgctgcttggcactgcttcaacgggcttactgctgtaaattggcacttctcttgcattcctttgattcgtaaaactgggtctctgcacattgaaccccttgctgtagcctctgtttatgtttcccagcactctattcttctcttccacttgccttgctttattcatagcatccatcaaacatctcggctcatgcaatctcacctcagtgcttatttcctccttcaatcctttgaggaaaatttctattaaaaacgattcttccaatcctttcactgtgcctacacacttctcaaactggctaatgaattcttgcacagttgtctcttgtttcaaggctagcagcaactgaaatgggcttcccagattagccccttggaacctctgaacaattgcaatcttgaacccttcccaagaatggtttgggttccaagattcccaccactgataccaacccagtgcatccccttccattgccatcattactgcctccagtttatcatcctctcgtacacattgcaggcggaaatacctttccattttggaaagccacccaagtgggtcttctcccgtaaagaaaggtaattcaagattccgccacttccctcccccaattccggcgttctccttgttgcgaatcctcgtttcctcctccctagctttcgccgccgccgctggttgctcccagaccgccgcaagcttctgaattgcgtcctccatagatcgtaagcgagtttccatggagtcgcgcgtttcctcgatagcccgctccatcatatccattctcgcctccattcttccgttgtttttctgcaccattaatcaggcccagctccaagatcggagctctgataccagttgatagacactggttcagaatttaggaacgaaaagaattattattgctgaagaatgtgtttacagagctgctgtgatgagtattcgaggtactcatgcctcccaattacaatctcgataattcccccccactaccctgtttccgtatctgtatactaacccccccactaactgtctaacaattcagttagttattactaactatattgtgctaattgtccctccttttgtacacctgcccccacctcctaatcctactcctatcaaaaactaaaacatcatgaatgaacttcattaaataagaagtgaacctgcacaatttttgtgattttcattaaattttagccaagagtagagagtgtattcaaaagagtgtgctagagagtgtattgttagcatttctcatgtgtatatgtgttacttccaaagtagtaaactttcaactgcaataccaaaacctagtaattgttttttccaattgtttattccttttgttgaaagcttaaagacctgtatagtcttttgttattatcgtgaacaaattctctcaaatatatttgtattgtaatttgtaggttgataagcagcctgtaactataggggttggaaacatcatttctgaagatggtttttcattattgatgtctccagcggctgctgcatccatttggaaagctattcttactcaaggagcaatcccaatgggttctaatgcatggaataaattacggattattcgaggtactgaattgtttagattgtgtgcatatttctatgtctgtcattggtttctacagttgaataatatagcatactaacttatttcctgcatattgtttctgtcgtaatttaggaattatttaggagtagtcttggagactaatgatactggcataaataaatctttgttctttttccccaagatccaattttccactaatgaaaattgaggttgcacagttgcacacttgcacactggaattaggaattatgacattacttgaattctcatcatgttattttcaacctaattcttccggtgtatgtaaaaaatgcttcaagcccatgcggacttttggtgcaagaaagaatacaaatgcatttagatgtcaattgtggagtgcacaatttccttctagttaagaatagctagtattaccaatgagggttggaagtaatggaagatagtccccataacgtggtgaactacagtttcagtccctattgggagaggttctcattttgtgtttgatcatatgtcaagcaaatttcttcctatggaggatatttttgtaaaaccaaaaaatgaatgactggtttttataactactagaagatttgtaagcatttaatatttgcctttgggttgaatggtatattctattggataatgaaactgggaagttttttgaaatgcgagtaatttttttttttttttttttgtgtgtatatagtttcactccctatgattcttttatctaatattgatcataacttgatttcttaggaaggcccactcctggaatggagcttacaaatgaattcaatgtcctggaggcctgtctttggaactcggtttctctaaataagggtgtgtaactgttcttttgccgctacccatctgcgtaaaagttgaaacttgctgaataattagtctgactgaatttttcaggttgttacaaaggtcaggagactatatctaggctcataacatatgatggaatcaagcagaggttatggggatttcatctttctgctcctgcagaacctggcagcattattacagttgatgggaaaaaggtgctatataatttcttttgaaaaatgttcactatttttttcttcaatccttatgtatttgttaaaaaggaagatggaaatttgcatagcgtaattcccagttgaaactaaagatgacaggtacgtggtgaaaactccagttacaatgtttctctggagaaccatcttgtaaaaaaaatggataactaatagtggttccctgagtcagtagcctagtgcttgtgatgttgggttgctttctgtaatcctaacattctccttaacgagttggaaagaaattgatggtttttgcaagttttgcaggttggaaagttaaccagctacacatctggaaggaaggaatctgaacactttggattaggttacatcaagaggcgagctgcttcggaaggagacactgtaattgtcggtgacaacatcaagggaacagtggtggaagtaccttttctttcacagcagcgtccaccatctgctagttgagcttcctgtgtggtggcgctttttggtgtgttgttgaagaagcagatgcataatactagtaaattagttaaactgttagtgaaggtgtttttgttatctttatcatgtttgcggcgaattagtacatctgttgtcaatagcaccaatcttggaaaataatacatcttttgcttctgttcttgtcttcttggaggctgcctccttttccagggtactctcgaatgacctttctacagtcctaacagaagaattagaatgaagcagcctgagtccattcaacataggagtctaaataactttcccaatttgtgaccatgtcttcttttttttttttgatgaaatttgtgattatgtcttctaaaccaacggtgtttcgtttcgccaatttggccaattaagactacagcagcagcccttcgacgcgtaatttgttccttttctccaacctgcttctcttcattctttagaaagtggaatgttatcttgtagaattagaaaacaaaattttgctacgttattcttagtatagctttgaaacaaaaaccttgaattaattaagaatatcacgattagtattaggatgaccaatagcttgcttgcttgtctgaataccaattttagaagtcacgtggacccaagtcagttgtcataaacaagagatacacaattatttgttaactaaattaactttgctatcatgacaatagttttatagaatgaaattaatttaattttttttgacgttgttctcttctatatttcttcaattaaatatttattattctataaaaaatttctttgtgacaaatttatatctcagtaaaggttctttatttttaaatttcttaaacgagtttttagaatttaactgagaagacgccgagagagacattaaaaaaaaacttgattcttaactaatgttttatatgttgaaaaaggaagattaacttttcggttcgatgttcaattccattcaaagacacatcaagaacattagcagtgaaatacgacttgttaatttatgaacaacctttttctctttttcttttctctttttatggttatgaacaaccttttatattgttaataaattagtaaatatatatattaagcacgacagcagtgaaatgctgactttctacctaaaaaatacaaaagaaaagcaaagaacgaagggggttgttgtatatccaatccatgggttcttcagctcatgtttgacaaatctaagggatctttcacgtgcagcgtcttggttgaaaactgcatgcgggaaacgtcttggttgaataatttcatctgaaaattactgaatttaaattttaaaaaattatacatacaaaaaattatatttatttaaaattattggatgccttcattcatatatatgtgtgtatatatatatatatatatatatatatatcataattaatgtaatatatagttttaaaatgtcagaatatgaataaattgattaactttttattattttataaagatttggaaaaaacttgatatttaacaaggcttgagactggagcgtatatcttgaacagatattgattcagacttggcaccctctgttgccacaactgtctttttgagatgatgaaacaaatagttagaaatcaaaacaaatcgaaaagtacttaaccaaacaaaagtcaacatacagaagatacagctctatttccatgttttgaaaaaaccgttggcagttgatttcccagcctttgcttttgatgttgcaccctctgaaactgctctaccataagttcctcaagtggtcatccatagaaactcttgaaatttacacactgatgcaaaaacactacccaattcaacaaaataacacagatgtacttttgttttaacaagtttccttttcaaagatgtatatatatatatatatatatatatatatatatatatatatatatcactaggcacaagtatttttcaagcacattggaaaccagaaagatggagttctacagtgtatggcatacctagaatcttaaaaccagtagctagtgtatttaatgcagcattcctagtttccccatcccgttctgcaatcaaacttgcaacaatttgcaacgactttagctgcccactaatctgtccacataatgcaaggagaaaatactgaataataataccaaaaatagtaataatacctccaccatgatgatcaataataaatccaacaagattggcacattcaattcgagttcggttattctctgagcgaaaaccctctaatatataagggaaacatttagatgcagaatatatggcaacaaattgttttgtcagctcccgcattttttctcgtactttctcaatgttatgccctaactgcaacagtaaaataagaaatgcattgtgacttcctcatctgtaacacccaaggaagtacactagtcaaactagtatctacgtaaaccaaaaatttgctgaaatcaaccataccatcagatagattcactggaataacaacatcctcaggtgtcacaaatattaaagttgctaatataaaccttctctactaggcacagaagaaacactgccccttcagattcggtccaagagtacccctcgtccttcaaagtgtcaagcagttcaggaagaaattccggcacctatgcaattaagaaaagataagactctatcaagtaagtatactcctataaattaaattgaataaagttaagactaacaccagacatctccttgaaaaggaaggaaaggaaaagaagaaaactgaaatcacaacaaaaacaaaaataaattgaactttcaatagacatattgtgtttgatttgaagaactgcaacacaaaccacctcagaagactgtccaaaacttgtataacttcctcagcaatggatggaagtgtctgaaatatgcaatagcagtttgtacaagttctagtgcactcaacacttcaaaagaatgtaattcagaaggttaaaagaacaacaccttctgcagaatttcaagtccatcaacttgcttcttaaaatctgcacttaagagtctcctatgtaattcctctctgaaatactttatcattctgaaaattgcaggcacatttattataattcaatacttatagatagttcaagttatgcatgattattcctcaacaaacagccccaccttaagatcttgaatttgctcaatacgtggctcctcaaacttaaaccttcgaaccaccattctctctcgatcttcctgcttgcaagaaaatccagatgacagtccaaccacatatttataagattttaaacaacgtttggtatactccagttcagccaacaataccttatttgaatccttgatatttaacaaggcttgagactgatcctgaaaatatattgattcagacttggcactctctgttgccacaactatcttttgagatgatgaaacaaatagttagaaatcaaaacaaatttaaaagtacttaatcaaagaaacatcaacatacagcagatatagctctatttccatggtttaaaacaccattggcagttgatttgcttttgatgttgcacccacaaactgctctacccgactcaaatgactctaaagaccatagaaaggagtaagggaagatatataagcacaaattcaccaacattcgcaaagaagaatgaaccaaagaacatgccttgaaaagctccttatggttttaacttctcaataattagtgtcggtgctggtccatgaatgtctttaaccatcttttcaatctaaaaataagtaaacaatgaagatgcttgatattacaagaatattaaggaaacaagggaagaaagcagcattcttcttatacacataccatttcatgtctactagctctcagtatctcattaatacaagctctgatgccttgcgaacatcggaagatttatcctaagaagaagtcatcatacattttgttccaagaacatggaacactagacctaattcgataaatggtataaaaaatgaaaaagcagaatgcagagtaaccagatcatactgtcattgcagaagaggcaggcttcagcagttgtgcaccttcagcaaaactacttaacacagaaagttgccccgataaccaataaaaaaatattacgtccttctgcaccaagtttagagtccatcaaagcaattgcaatatatggaacctataggaaaaccatgctaaggacacagataccaggacaaaagaatgaaagaacacagaaccagcacagaatacagaccatttcaaccagatggacagcagccagccaagcatctaatgtattcagcacacattctctcatgtgcttcttgttgtcaccaagacatttcaatatatatcagacagaataccctgcaacaaaccatttccagaaatgttcaaacagcaaaacagcaccaaattggggtgggtggggggggggggagggggggagggttaatacgaaaacagaacagtatcctcttaccttgcttgccttcttcacagcttgacccattgctgatgcaacattgccaattgctgtcaaggaagccatgacaatgtttttgttgctatcaacaagtcgtcccctaagagccccaaacaactcacctggtaataaaacagttaggaacaattatcaaaataatcagctagaaatctagaataactacaaaaagataccatgcaacttatccatttggggaggaagttgatgaaaagggagactaaagagagagcataaggttaaaaaaaatgctaatggagtaccagttccagttgcttgaatgtgcttattagcctcttccaatgacattcatcattaacaacaaaaagtctagacgtcttatacaaaacatacaagtaaataccaacaaacgttaaatacaagcttcctagataggaattatatatcatcaacaatcattttttaaatcaaagccttcttcatcattttcactataattacatctacaaatatgattttaggaaattaaatcccacaaatagccctccaaacaagccctaatgtctctattcagagggattttttggaatcaacacatagcacccactacagacactattcaacccgctatttggttcactgtggacactacactaaactacttcactacagcagcacccgtagcgggcaggggtcactctgctctgctacaccgctatagcattctatttaagaccctgcatagaactaacctcatcaaacataatatacctaaaatggattcatctcatactttgtatccggggcactgaacagtgcaggctttacatcagtaagaagaaaccctttaatgtctgcaaggagaaaaacattagagccttgaaaacaaaattgagagaaatcaaaatttgaaagttaatgcaaagtgaccttgaccaacaaatctatgcagaacacccaagaattaattgatgcatttctagtagcagcattacttgactgcagcccatttctttaagaaaatcaattaagtcctgcaaaataggatttacaataaaccatacaaacttccaacaacaaataaaatatctaaaaaacttgcaaattcagataatgcacattaagctttatatgtgagacaccaaaatcttaaacagcagaaaccatccgcaaaattccctaaccttggggttcttatgctccttcatgatcttgtaaagctacaataaaattctcagtttttcaaacattatttgataatacaaaattcccacgtcaagatcttgaatttactcaatacgtggttcctcaaacttaaaacttcaaaccacaattctctcttgaacttcctgcttccaagaaaatccagatggcagtccaaccacatatttataagattttaagcaacgtttggtgtactccagttcagcctacaataccttatgtgaatccttggtacttaacaaggcttgagactggaccgctatatcttgaacagatattgatcagacttggcaccctttgttgccacttgccacaactctcttatgtgataatgaaacaaataggtagaaatcaaaacaaatctaaaagtacttaaccaaagaaaaatcaacatgcagaagatacagctctatttccatgttttgaaacaccattggcagttgatttcccagcctttgctttcgatgttgcatccactgaaactgttctagctgactcaaatgactctaaagacaaaaaaaaagggagttaagagaagatatgtaagcacaaattcaccaacattcgcgaagaagaatgaaccaaagaacgtgccttgaaaagctccatatggtttcaacttctcaacaattagcgtcagtgctggtccatgaatgtctttaaccatcttttcaatctaaaaataagtaaacaattccaagattattgaaattacaagaatattaaggaaacaagagaagaaagcagcatttttgtcatacacataccgttgcatgtccactaactcccagtatctcattaattcaaacctgaaagagggataggtggtgcccgtggtggggttcaggggaagaatccaacacttctggagcaattaacacgacaagaagggtagaaagaaaaacaatacttccttcttgaaaaacaatactttagaacaagtcaccttggtcattttctttaataatttcctgcaatatatcttatcaatgcaatcaagaactctgccttaaaagatgaatacatattagataaaacctcaccttcaatatcagtccaagcaattgtctaaagagtacgagaaagaagagaaaacataagagaagaaggaagacgcagagaacatgctttctgccatgcatgcatgtcaaaagaaaaaatcagtattctctcatcttcttccctctattagattttttctcttccttcttgaatagaaatcctgaaccataaagcaatgcagaagcctgttttgatgaaagtaggattgtggaagaatcagacacaatagcaatgtatttatagatgaatcaattgaaacgtcgttagaaagaacgaaacggtcatgtcaaagaactaagaaagaatgaataaattgaagcgccgttagaaagaacgaaacggtcatatcagagaactaataaagaaggctaaactaaatgtgatatttattttgataataatgatcattagtggataaaaaaattacaaaattaaatatttttcttacgaaatcatgttaaaattataaaaaaatgattttttttatctaaatgttaacataaatgtagactatacatcataaatcattttataaaataattaaattaaatttatttgataatatatcatattttatatatatatatatatatatatatatatcattatcataatgtaataaaaaaacatgaaaagataaagaataacgataagataacaattcaaatttttaaattaatttgtttaagaaattgacactatcttattcttactagtaaaagaatatcacctagtaagaataagataatttcagttaccttctttagttcatgaatcatatccataatgaattctaattaacaacatattaattgttagaaacgtaaacgtgatattttgataatttacaactttaaaactagctcttgtaaatagaaatgtctttcccatttaaactttttaacactaaaatactaatatagtaattcaaagatttaattggcatttagttttgtaaatattgaaagacataaaataatcaaatcacacaaattgatagtgttggtttcgttgagaggtttagggagaaggaggtaaaggaggcaatatggcaatgtggaagtgctaaaagcctgagtttaaatgaatctaactttaaattcattaaagctttttgacatatattgaaggaggacatcgtgaggtttatggaagaatttcatagattttgtattttttcaagaggctcaaattcatcattcatagctctaattccaaaggttgacgacccacaaggccttggggagtttagacctatcttcctagtaggatgtatgtacaagatcgtgacaaaagtgttacacttgaagaaagtacttaatgatgttattgatcaaaggcaaaagtgccttcttgggcaagagatttattgtacatagtgtgttgtggctattgaggtggtgggagaagctaaaaggaaaaacaaaagttgtttggtcttcaaggtagattatcaaaaagcctatgattcagtgaattgagatttattttatgaataattctgacaactttgggagaaaagattaaaataaataaaaaaatgctaacttattaaaaccaaaaacatatttaaatcttgtaagaaattaagatttttatcaattagtattttcgtaaatgaactactaagtaatcaagaattaaatgtagttcaagatttttccatgaatcatttaattttaatttctcctattcttatctttattgtctttttttacaaatgaagaaggagttattatatgaaataaacatttttcatgaaaaacaaagcttttataaaatgttttgttgcatttgaatcatcctcctagttcacaaaacccatttcattcttacattggttgctaaagtttttcaaaaaagcttttgatcaatttcaaaaaggtttaagagatctcaaaaacataatttaaattctttcttattttcttatgttttttttccctctcttgtatttgcagttgatatgaaagttcaacctcatgagttaagcatgtaatagtatggagaataaagattcaagggacatgattcataggtttcttgaattattttaaaaaaattaagaatataattaaaatacattgacaatttaaaaatttttatattgtcatctattacatataataaaatttacttttgtcataattactaaaaaaatcacatttaataatatttttttagttgataatataaaaatctttaaaataaaaatatatcaaaattaaactataattttaatcaatttcttatacttaatagaatccaatgaggaacaacaactgaaaaagactattaatattgaggagtaaaaaaagaaattcacttgaaaaagagctcgtgtttgattagctaatttgtgaggtaataacttaccaataagatgatctgactcaaaaaaatgatcaaccaaaataatattattacattcctaaattcctttatgatatcttctaaggaatcaaattgatttccaaattaacaggctagtgtgagtttatccatttagttatacacctttaaataaaaaataatttttgaaatgatcacttgccgaaattaggagaagcaacatgtattattgtgggccaatccattgaagagttcagcactcaacttaacattaagaacttttcatcgctggctggagtaaaaaaattcaattaaaaaatatttataagttaaaattcattttttttttctgaaatatatgaacttattttaaaaactctaaatagtttttatggaaaaattttaaatagttaagaaactgacatattataatatataaagtataaacaatataatactacatttttctgaataacttctaatattgttattaatttatcaaaggcgcaaaaaagtatttttttttataaaaaaaatcctttttatttttagtaaccgaaatgtaattatctaaaaaaggtaaccaagatgtaacatgggatcgctgcactaacgtacttagtgcagtcgtcgcctttggtcgtctcttcccaaaaaacctgcgagtcctcgaagtgagaacaaagatcgaaactttcgaagctcctctcacttcctcagctgtcgcacgtgcaaatggggcatcaattctgaacccacattcattctcgctccacaaattcaaatggggtgcctttggagatctcgatgttgggttctcattgtgttggtgttgtcgaatattggttcagccattgctgacactcctcagagacccaagaatgttcaaactgcactccgtgctaagtggtctggaactcccctgcttttggaagctgcgtatgtccttgctcttcctttttcaaacatttttatgtgtttttgtaatgtggggtggtgttatttttagacttgtttctaatgttttgttgaaattgtgttgaagtatacgaatgcgtgtaaaggagtgtgaaatgggaatatcattgtcatttgtttgagttagacatgacataatggactgtagtgtctaaaactagaatttccaactcaaatttagtagtgtgtgggggtcaggtggtggaattttgaagcattatgtgatacttttcctgattgtttttctttctgaagtcttttgtggtcggaagagattgtttagatgacaaaaagatcatcagattattaagtttggcacatggtgctcgtcttatgattcatatagatggatgatatggaaatattcggctgaactgaaaatcatggaatttgatttatctttacatcatgtggttagttatgacttatgaggatgagtgtgaaatacttttgttgtgtcgttccctcttattcttatgtacaacatatattactgttttcaaccgagttaaatgccttgttacttcatatgcagcattcgactgcagcacatattgtcttttacattatcatacactatttttctttttttaaatctgtctacaatttttggccaattgtaaaatttccatgttataacatccatttattgtttggaaacagcgaattattatctaacgaaaaaaaggaccttttctgggtcttcgttgagatttggcttaatactgataacgatgctgttagatctcaaacagctaaagattgtctgaagaaaattttggaatgtgggcgccctcttctaagggaaccattaaaatcattatttgagttctctcttatgctgagatcagcatcccctagactgatgctctaccagcaattagcggaagaatctcttgcatcttttcccctaggtgatgaaaattattcagatgatgagactgaggaaaagttgctaacagaaaagattgaaaggagaaaattagatcccctgcatggtgtaaacctgaaaagccatggaggaaaatgttgttgggtggataccggtgaacacttgtttttggatgtttatgaattactggagtggcttcagggctctgctgagctgtgagtactttgttgccattagtgcacttctgtttgtttgtttgtttatttttttattttatttatttattttttttaaaattttccaatgttgttgtcaattgtaaacttttgccttcagggtaggtgattcatttcagacacctgaaatatttgattttgaccacgtctattatgagttaagtgttggaagtccagttgctatcctttacggtgcacttggaaccaattgttttaaggagtttcatgttgctttagttaaagctgccaaagaggtacattccttaacttgtatttcttgttttggtattaactattaggaatttaggatcttgctaaccaatgccctttaggcatttctaaatgcttctatttacttaaaaagcacatgtaaaatgatttttgtattacccaatataataaaagctctcatttcttataaaaacttttttacttttgtttacttaacagagcgtttgcctaactctttagaaaatataatgtgatgtagtttttggcagctattataatcatttagcattctgctgtacaagcctccaaaatggatttgctttcaagtatcaaatgatgtaaacataatcattttttgataaaaccccaggagatttcaatggagagaagaatgtgaaacaaaaggtgtaaaactgataagagtaatgtaaattatttgaattgcacctgaattatgagatgtccatcttctgtgttataaaatatcccagatattatatatctcttcaagtgaagtttagattaatatgttagttgtatgcaacactaatgttttttgaagatatggtaatagtcaaggagttgtgaaacgatgaaatcattaaacagatttatattgttgtcccatatattaagattggaatttgaaaaaaaaatgtaatgcttatctaatatatttcccatgcaactatattaatatgttgactgaataatttttaggggaaagttaagtatgttgtacggccagtgttgcctgctggatgtgaatcaaatatcaatcattgtagttctgttggtgctggtgaatcagtgaacttgggtggttatggtgtggaacttgcactgaagaatatggaatataaggccatggatgacagtacagtaaaaaaaggttagaatgattgacacatgttgagtgaaggcttctagttctctttaactttgcatactgagtcaattgtagaagaaagttagtacatgaaattgtgattgcctgatcatcctttccaattttttactctttgtaatttttgtaatttttaaaatgtcatatttttcgagaaattataaaagtattctttctttaattttctttgacttcatgacctccatgcttgcattgctattcctaggatttgacaattttattaatccttgttaggaaccaattgcaaggtatggggcaattggatcctaacaatactctttatgtaagttttctttgaacttgcattttttttttttacgatgtcaattttagatttggactaagaaacctgtgacatgcttgagtgattagcactagcagagttaatacacacacttttgaattaattaattgcatattacatttacaagaagaataagcacaagtgcaactacctaagtacttgaattaaagcaccttgcatgaatctaaaatttcatgaatctaagctttaaattcagctattcccaatagatttgttgcagtttccaacaatgtcctttcattcattttgcatggtaatatgtactattctcaaggtctaattctgctatttaaagaagttttccttaccctttatggtctttctatctggttacttgagttagttagcattgaccttctccaaccttacctcaatgcattgatttataagtttatcgttcgttaaagactctccatcttgttttcctacaatgagtttcaggtttgaagattttattaattataactttgaaatagataattgaaaagtacatttcttagtgttaaattatttctggattcacaaattcttttggtgttttgtatattgctaatccaattaaaatggttggatatttatatacatcaagaaagattacttgtgattaaatgattgattctctcattaacacagttgaggattgcaggtgtgactttagaggatcctcgaactgaagatcttagccaggaagtcagaggattcatattctctaaacttctggtgtgtaaactcacatttgtttttggacacacacatgataatgagaattttgtaattttcaataaatttcaaccaataatagaagatgtgtgttagagattgtgttgctagcatttctttttttttttttttttataaaagagtgttaaatgtgataatattatgtgctttgcgagatataatgtaaagttgtgtccatttgccttctcactgccttgcagcttgatatatttactgtaggatattatttaatgccttttagtcgattaatatgaaaggttttggcaggatgaaggaagctaagatcctttggcattgcccactttttgcatacttgtggtgttatgaacagaaaagagtgcatagttttgaatcagaaatttatttcctagtctcttttgtgggattagatttttttttctgcttccatatggttgtcaactcattatttgctttggttaatttcataacattataaaagtatattaatatttatagtgaagtatatttattgccccacctcaaaattatccagacactagtgttaccaataaatttacctgtttttgtttactcacaggaacgtaaacctgacttaacatctgaggtcatggcttttcgggattatctattgtcatcaactgtatcagacacacttgatgtttgggaattaaagggtatttaaaatatttttctcttttcctctgataattggaaagattggaagctgaatcctatcgcagttggcttcaatgaacagtgttctatgttttttccccttctttctgatggtaacagatctaggacatcaaactgtacagagaattgtccgtgcttctgatcctctgcagtcaatgcaggaaatcaatcaaaacttccctagcatagtttcttccttgtctcgcatgaaggtacataatcttgttaattgttatttatgttaggcactcacatatttttagacattttccttggaaaaaaatgtctattattcttacggaactgcttctcatgacagcttgatgattctgttcgagatgaaataatggcaaaccagcggatggtcccacctggcaagtctttaatggctctcaatggtgctttagtcaatgtcgaagatgttgacctctatctgtaataactttttttcctactgataatttatacattatcttgtcgtattcatgtttgtgcctctattatagctagagttagtatttttcaatcccctccagcacattaagactttgctgtctcatatttatggttcttttgatgttagttagcacttagcacaagattggaagagccaaacccaggtctatttatatacctatggtttggttttgtgtttatttgagttgagcctattcaaagtatcttacttatcgtatggaattcctttttttatgttggattaaagtcatttcctatatataattgtaaatgctttgtcaactaattgttattattgtttgggagaattgtttttaggttctaagaatgtaaatatttagcagtggtttgatcctggtttggcagtgctgaaatttttgaatttctgatactattttcctgttattctttattaggttgattgacttgatccgtcaggatctcttgttgactgatcagttctcaaaattgaaggtgaatgccatctaattttcattttgtcatatttttactattgcactaatttctgtttaactattcactgacctagtaattgacagatgaaaaatagtcatctgatgcatattacctaagaaaatgttgttttcaaaagtaacattggatagtctcctaagaaaacaatttgtattgaaaggagggaagatgagtgggaggtgaagaagttaatggtattttttccatagaaaaaatggcacgattacctgtttggattaagaaaatgttttggttttcatttcctattttcataaataattaccaaggtgggattttgtaattatttatggaaacataaattttttctcaaactggacaagcccttaattttttaaacttctattaattgctaccatttttttctctttataaaactcatttgtgatatgtacatacacctgaactgtattgttgatattctcactatttgcagattcctcaagccactttgaagaaattgctctcaacttcacctcctccagagtccagtatatttcgagttgattttcattctagtcatgttcattatctcaacaacttggaagaagatgctaaatataaatggtggagtaacaatttagaagaggtgaattagtgtgtttggattagctttatttttttaattaaaaaatataaaaatcaaagtgttcaagagatttttctgactgaagtactgtttgtgtaaagatttagcctaacctaacatattttacatttattttgcttagttcttgatgccagccttccctgggcagctacgttacatccgtaaaaaccttttccatgctgtctttgttcttgatccagcaacccgttgtggtctggaggcaagttttttttcctcaagcttaacattttcacattattcattgtatatgtttccaagcaaaatcttagtcacttgctttattgtttggaattttgcagtccattgatatgatcatatcattgtatgaaaataattttcctgtgaggtttgggattgtgttgtattcttcgatgtttgttacacagttagaaaatcatgctacaaaagagcacagcgatggagatatttcaactacggtaatttttaccttttgttgttcaggaatgtgtgtgtgataaatgtcatagaaatttttctatatgttatagtttcactggcaagtttatgacatcattttttttctcttttcagattatatgtctcttcagttatatcaacgagaattatggtgctgaaatggcttaccggtttttgagcaatgtatgagtgtgatacttagtcattagtgtcatcttcagttcaatgtctttccatgaacttacttacgtctggtttaaaagttaaaacttcatatgccagaagcacatgacttaaatccaaaattaggaaagaaaagtggcagatgcagttaatattgttatgttgttctttcattttactccacccatcttgaacctaactacatatctatttgatatcattaaagttcaaaatttgaaccttccaagttgcttgatttgacttaactttgaattttcaaccttatgactcactaatctttttttctttttaaattttccccttgtctatcactatgcaaatttctagataatcactttcctatgaattcaattatttattttaaaaaaaatcatgaacctagtgcgtaacatttgacaaccttttaagtggcttcatctcttccccattaacatgacaaaaaagggaaaaataaatctgaaaggtttgtttagaggtttttatttatattgataaaaataaaaatgtttatgctgttggaattagcatacacaaatagatgatgctattatatctaagatttttatgaaacacattttagcagttgttttgagactttaaaactaatcttattttcaattcaattaaaggaactatattgtacatttttgtaggttaacaaattacacatcgagtcagatggcaatgcatatgatgctcttgaactgcaccatgttgaaggagtgtttgtggaaacaatattgtaagttttatagtactttttgttgattagtatccttctgacatttgactaatgtagtgcttcaatattttagcagtaacattacgttctaatttattttaaacatgaattaaatattctctgtatttctatagatcaaaggtaaagtccccacctcaagagatattactaaagctgtataagaatcaaaagttgaaggaattgtcacaagaaagctccaagtttgtatttaagcttggtttgtctaagcttcaatgttcattgttgatgaatggccttgttattgatcccactgaggtaatgatttttttaacattttccactgccttaaaattttatttcctctttttttttgtactttttcttcaattctgctgtcaattcacaatattttatattgtacaaggtggttggccaagatataagtgttgagagaaagagaaaatgaaaaatgtgatgaattgctgtgtattaaagagcaaattatatatacagagtgtaataagtaccgtacaaggatttatagttacatgattactgtaattacgtgatatcactaattacataatcgacctataattactctgtttacattaattctgatagaattcagagaaagagaaaaaagatttgtgcaactgaaagtaaactgtattattgattcttgttgtaagatttactgttgtgtgttgtcatattggaccacaagaaatactcttatttataatgaaggaggtttacaaaataaggaaacaaaataatgagtaataatggaaataatcccatactaaactgctctaattaaaacatatcagatatttttgacactttccctcgagctggagcatatatatcatatgaaccaagcttgttacaaatgtggcaaacccaacagaaacaaaagacgattccgatcatggggttgtgcagaataaacctcggcggcaaccaacgaaagcctgtagtggcgatgggtattgttcacctttgaaaatagcatgccctgaggcagaaggatgcggttccagtgtgacacgtcacatgttatgtgcttgaacttttctcgctggaaaagggccctgcgtggggttgctgtggcggtgtgttgagttggttgcacatgtggacagcctggtggtaggtgtcatgggtagctggcatgtgatgcacacacgctggagagtggtggtgtgtgcgtcgttgaacggcgacatgacagggtgcacgctggtcgccgggaggtggagactccgggggtatggttgcgtcggagatagaaggcacgatgactgccaatagagggttgcagcagcttgcggtactgttcatgcgagaacgaaggcacactgcagtgataatggaaccaaaactgtttggcgtgtagaagaaaggagaaagggtcatcaaaagaagggcagtgagcataaaggtccaccgatgacagtaggtccccgatggagaacgactttcattatttctttgtcaataataacctgctctgataccatgtaagaattatttactgttgtgttgtcgtatcagaccacaggaaatactcttatttataatgaaggaggtttacaaaataagaaaacaaaataatgagtaataatggaaatcatctcatactaaactgctgtagttaaaacatataatctttgacacttgaaaaaatcagttacaactgatagaagctgactatgggctagctgataagcttggcccagaccactaactgaagcccaaaacagaaaaagaaaattacagtgcaagcatgagaggtgatctctaatactactttctgtaataatacctaacagtaatattgtggtcttctttgtaaaatgagttctttctctttgttttttatatgtgctttttcttaatgctggcaacccaaaacaaaataaaataaatagcactggatacactttatgtagtaaaatgcagatgagtctcttacaatgcactaataaactcacagctatctataaatttgtaagatccccttcatatacttatcattgtttgactacttgcacttatccatactgttgtagttttccttagtgtgttgtttaattttggatattctgcatgtgctcaactttagtttaaggtgagttgtgcccaatttttctttgtctagtataactgtgatgtattaatagtgttagtagaatagatttttcctctacttatttctatgcaattgtgtttaccaggaagctcttataaatgccttgaatgatgagactccaagaatacaggaacaagtatattttggacaaataatgtctgacactgatgtattagctaagtttctatcagaagctggtatacaacgttataatcctaaggtatagtagttaaataatttaataatttaaattttgggaacatttatagtgatactcattaaccagtttctaatgctaatcgtttggtatagattatttctgacagcaaaccaaggttcatatctctgtcaatgtttacttttggggaggaatctgtactaaatgacattgtctacttgcattctcctggaagtaagttgtttaaatattagaatctttaatttcttttgtacagtctgtttcttttgttgtcacatgtgaattgttttgatccaaaccagcaatggatgatacgaaggctgtgacacatcttcttgctgttgatatcacttcaaggaatgggatgaaattacttcaacaaggcatacattatctggttaataccaatatgcatttcttttaaatcttcttggttctttttaaattattgtgcctaatgcctattatgagttggagcaatttatttgatgcttttaagcatatttgatgtttttgttatttgaacataatgctacagatagaaggatccaaaaatgctcgtgtaggtcttctatttaatgccaatcggaatcctaatttgtttagcctcctatttgttaaggtctttgaaatcactgcatccttgtataggtatgtgtttggattttgcttttaattcaaaagctggttaaattttaattgattgtttaatttcaattctgtgattttgtcaattcctttccaaagtggaagcaccatttttatatcaaatgtttgaatgcatggtgtgcagtcataagacgaatgtattggacttcttggatcagctttgctcactgtatgagaagaattacatccttacacctcctatggaagctgaaagcactcaagcatttgttgatattgtttgcgagcttggtgaagccaatgggttaccatctaagggctataggtctgccctcctagaatttcctgccggtgaagtgagaaagcatttgactaaggtacttctagtttatcttgccatttggacatttgcttttagttcttaacaacccaaccctgtgcctcatacttttactttttctatttgatactaatacctgaaggaaatggtttcctgctgctttttttttccatttctgcttctcttttatgtatttcattttagtttgcactatgttaaacaatttcagagtttttcactaatatttttttgtctgttaattgtgataatttgtattaattagacgtcttgttatcaggtgcagaattctttgtatagggtgcttgggcttgaatctggtgtcaatgctgtcttcactaatggaagggtaatattgttttggtgtcttcagctatttcatagtataactgatttctgatgaataattgttttcattgcttgtttacaaatataattttgctcttctctctcaaaatttgctgatgaattttcaccaatccttaaatttccttattaatcttgtgttctttccttaatatctatctttaataggtaacttatccaattgacgaaagcacatttttgagtgctgatctgcatcttctggaatcaatagaatttaaacaaaggacaaagcacattgtggaaattattgaaaaggtggaatggcatgatgtttaccccgccatgctaacaaggtttcttgaacttttctgtctctgtttgactcactttaatttttgtttgatttctctatggatcattacatatatcaccttcctatgacatgctttcttttaactaaaaaatgttggagggagggtctggaaaaccaaagcctaaaagtgaggtgttacatgacatttttggcacaacgcaagtgcacagatcatacaaagaataaagtgatgagataatcataagtattgtttcccaatgattgattgagaaaccatgctagctatagaccaatttctgcagaatttatattcaagcaaatgaatatgggaatcagttgaatagaaagtaagtttagaaacaagaaattaaagaattaaaaagtgcataggtgataggtcacatgaagcatgttgggaatcagaatataatgttctgaattcattgtaataattgtagtttataggcatataatctctgatttataggaaactgaatatcctctatttatgtgcaatgaatactataagcctatataaactctcatccatggtgtattcagacacacggtttcagttcaatatgcctatgattttcttttcttttaaaatagcaaactcccatactgtgtcttatgtgctgtgcaagctcatctattgttacatttttctgctactactgatttgttgagttcttgagaatttttggagaatgttgggtgtgccataagtcctctgatttatagtaacttaaacagattttttgttcaatcacgtctgtttactgaatatttaacaattctttaatgttgccctatgttgtttgcagcaaattcattagtgatattgtcatggccttatcatcttcaatggccatgcgggagcggaattctgaaagtgctcgttttgagattctgaatgatcagcataggttatttttattagttacaatgcactcaaacatttttttccttatgatttagtcatttttggattgctcatttatatgtattatatgatgtcagtatttctttttccatcatttatctgtgcagtgtcattattctaaataatgtaaattcaagtattcatattgatgcggttcttgatcctttaagtccaaccagccagaggttgtctggaattcttcgagttttgtggaaatacattcagcccagcatgagaattgtactgaatccagtggttggttcaaatctatctattgttctgcaaacatatataattatataataattttttttctgcaactgaaattgttccttcaataagattctttttaggcatttggaataaaaaagaagatggaaaaaaattgtttctctctcattgtgattggatgagacaagccaaagtgttgcccttgtgttgtggaactgtgaattttcccctaatttggctttcataaggccttctgttattcagtcttatgtttaggccttttatgccgataaaaaaaaaatgtttaggccttttatttttgacacagaatatatgattacaaagaatcaggaggttaaaatccttcttaaaataaaaaggaaatacagacaacagagaacaaagaaagaaaatctatccaatccctcaactgagttgtaaatgaaacttagtataaaaaaccatgtcggctttacaccaagtaaaaaccaattgtctgatcttatcttatcccaaagtagctgcttatccaaaggaactccttgatgcaatagttacacttaaaccaaatgtgcatgtattagtccattcacattatgatcaataggcttgtaggagttaattcatctatccctcatctgttctactctaaatagtttttagcttgtaacctgccaagagccaactctcccaaatgcttaactgtttaggtgaaggctcttgattagtttgatatccattgcactccctcttgcaagatccattaatgtgaaggcccgatctatcttgtatcgaaatttagcctttatttagaagaatggagcaacaaggattgaactcctgatttctagtgatagtcttatgcgagattttctacaagatatatttcttttaattttcgtccagcaaaatgtgttgccaagttctttatacatttgctaatttgtattgaatgctgtttttcatcttatgacagagttctcttgctgatcttcctctgaagagctactacagatatgtggtaccaacaatggtatatcttatttatttaactcttaattctctaagataattccagacatgatatttgatgctaggtctcacagggtttctgatttttgcaggatgattttagcaacactgactctgcaataaatggcccacaagcactctttgcaaacatgccattgtctaagactctcaccatgaatcttgatgttcctgagtcttggcttgttgagcccgttattgcattgtatgtattattttagaatttgttaatatactgattcttttatcaattttttgtttgaatgtaactggagacgagtaaattattgtgaataaattacactggtcttcctcatttaaaatttatagtaaccgtaacctattccattaagtagctgttagactcattaaaccattctaatgtcaatgtttatgttagtccaaatgtacccttgtctttgttaataaagaagcatgttataaagttgaattaatagcgtaaaaatggggtgaacatttaaaaagaataaagtttttggcatctaaatttgaatgaatctcataattagtgacacacaccaactctggtagataaataatcaacttaaattgttgaattaaattataaactctgaatgctttgtatttttctgtcatcctttgatatttcgggaatgggggaaataaatatgatttttccatgccttgagggaggtctatgtaatacatttctgagtttttatatgtaatgactactttttgtgaattttaatagtccttagtaatatctctcatgctgcagccatgacctggataacattcttcttgagaaccttggtgacacaaggacattgcaagcagtttttgagcttgaagctcttgtcctcactggtaagattgcatcttgtttattagaaatacaagctgttagtgatattattaaataatcattgctacttgttagaatgctaggccacatctatttgtgtagtagtctagttcattagcataattaacgcttttttaagaaaaaaagttatataagaaatttttcttttagaggccctctttaaaaaaaagaaaaaagaacagccacgaaatgacaacaacaaaaaaatgaagcaaagtttcccaaccttaacattcctgtaattgacaccacttttaaaagtccctacaactactacaattcaaatgcctaatcttatcccaaagaatatgcttgtccaaagggatcccttaaaaacaaaaataatgctcctgcataatcatcaaagtgtagcatagattgcacattaccataaaaatttggcttctttacttctaccataacaattaaagctagtcaacaaaatctaatccatggacctagggcacacccaacacactgaaatgtgaaacaaacaatttcatgaagaaacagatgcagaacaatttaagaacaaagaaaatggggaacctactctgctcattacacagtaagggaaaatgaatatagccatttgtagcctgtgaaccagcagcatgtcactggttaaatttctattaaacacttctgtgcaattaggatgtttaatatgtgtagttatgtctataacattagcttctgttttctccttgttagcttacaattatgaaacacaacaacaacaaagctttttcccactaggtgagattggctaaagggatcatacgaggccataaattactgtcatatgtttaactgtaaatatgggattggtctccttctacctctaactaatgaaatatgttccatctggttaaacatctttattggtgtttctaccagtattcactaaacatacccaaaccaactaatagaggctctatcaactttcctaaaatctctctaattattatattcctaattctgtcatctcttctatgttaacaatcattaatgagcactgtgtactaatctattgtcactcttgtcaaatctaatcaggtcactgttctgagaaagatcacgatcctcctcggggacttcagctgatccttgggacaaagactactccccatttagttgatacccttgtgatggccaacctgggatattggcaaatgaaagtctcacctggagtttggtacttgcagcttgctcctggaagaagttccgagctttacattttaaaggaagatggtgaaggaagttacgataaacaatcatcaaaactcattactattaatgatttacggggtaaaatatttcatatggaagtagtgaaaaaaaagggcaaggagcatgaggaattacttcttcctgatgacaatgcacaagatgagaagaaagtgagtgctttctattaaaaattgttctttaaaaacatgttttgaagcataaaatgataaacattattatttaaaggctaaagccagtgcaatccataacagatatcttcatgatatttttatagggaagtggcttgaattccaacttcttaaaatgggcttctggtttcattggcggcaacaaattatctaaaaaggctgaaaaaagttcgcaagtatgtcttttatttacttgtccgttagttttctgtcagaatttctgtctcgaatgctttcccttcattctgctgttcatccataaataatacagatttattgtcattaaagacgcatttcagccattaagacacaatgattctatttcctaatttatacaacctaaatcaggaaagctaataatatactggaaacaacataataacagaatcccttattgacatcccccctcaaattgatgcggctaatctagaagcatcaatttgctgctaagaaactgatgtcgaggacgaggtacaaccttggtgaggatatccacaagctgaagttgcggcgtgacatgaggaagagatataacatgagcgtccaatacttctcgaatagaatggcaatcaacgtcaatatgtttcgtgcgctcatgaaaaactggattagtagctatctgaatggcactagtattgtcagcatagagaggtgtggctgcaatttgagggaagcctatctcatctaagagtccacgaagccaaatgatttcagaacaagccattgacatagctcgatactctgatccaatggaggacttcgatagacatgattgctttttactcttccaagagattagcgcaggaccaagaaacatgcgccaacctgtgacagatcttggtgtatcagggcaaccggcccaatctgcatcactgtaggcaaccaaactaggagacttcccagtaggaaaaaataaaccacgagttgaagtgccttttaagtaacgaatgatggggcgaacaacggccaaatgaagatgacatggggaatgcataaattggctcacctgctggactgcaaatgaaatgtccaggaatgttatcgtcaaataattaagacttcccaccagctgacgatataataaaggatccgacaaaagatctccttcatcacgatgatatttaacattaacctctaggggagtatcaattggagtggctgaagcaagaccagccaaagaaattaagtcgtttgtatacttgtgctggtgaagaaagatacctctagaatcagtataaacttcaaggcccaagaaatacttaaggcaaccaagatctttcatattaaaggaggctttgagttactgcttaagacgttgaatgtcggcatgatcataaccagtaattatcatatcattgacataaataagaacaattccaatatttgtgcgatgaatgaataaggaggagtcataccggctctgagtaaaagaaaatcaaaggagagtagagtcaaacttttcaaaccatgctcgaggagcttgtcacaagccatagagagaacaattgagcttgcacacaccagcagacgaggaaaataggcctggaggaggagtcatgtaaatatcccctgccaaatcaccatgaataaaggcgttcttcacatccatttgagtcagtgaccatccctgagaggcagcaatagaaagaatggttcgaatagacgtcgtctttgcaacgggtgcaaacgtctcatcataatccaacccgtatttctgtttgttacccagtgcaaccaatcaagccttgaaacgattaacagtgccatcagaattcagcttcactgaatagacccatttgcaaccaatgggcttaacactaggggtttgaggaacaatgtcccatgtgaaattttcttggagggcagcgagttcttcgtctattgccttgacccaataagcatctttaatggcctgtgaataacatgtaggaacagatgtgccagatagagtagctgtaagagaaataggcccaaattcatgcctatctggggcacgagacacctgagacgagcattgcagtagagcaggcacaggtggcagatcagcagccgaaagggacaaagaaggctgacatctaacataaacatgacctggtttgaaacgttctatagaatgagaaatatcagaaaaattagggaggttaacaatatcattagatgaagacttaaaacatgggaagaaaatttaatagtcaaagaaaaccactttcctagagaaatgaaagtgatgagaggtggcatcataacataacacaagaatcctttgtgagtggtactataacctaagaacacacatgattgattgggccccaagcttatgacgtttaggaggtggaagtggacaaaaaaaacacaaccaaaggggtgaagatcaatataatccggatgaacttgaaagaggcgaaagaaaggagaatcaaactcgagaacttgggaaggaaaatgatttatcagaaagacagctgttgacagagtctcaacccaaaaattggctgggacagatgctgcaagaaataatcagcgtctgacatcaagcaaattttgactttttcgttctgcaatgccattttgctgaggtgtataaggacaagaacgctgagaaatgatgcctttttgttgtaggtattcttgaaaggcatgagacatgtactccccaccagagtcagtgcgcaaaatcttaatgcttgtctgaaactggttctcaatataagcaaaaaaattcttaaacataggaaaaacttcatctttagaacaaaggaagtaaatccaagtaaaacgactatagtcattaatatacataacaaagtatttatacttagaatgcaacaagacaggagacacaccccacacatcagtgtgtataattgtaaaacatttgttagcacgagtagcattatgggaaaatgggagatttttgcttttggcaagtttgcacactaaacacgtaaaggatgagtcagaaacaagagttttattgcccaacagaccattctctattaaatgagacaaaacaactgactttggatgtcctagtttattatgccaatcctcgaatgaggacgggacagtagtacaagaaaatgaggaaaaactaggagaagtaaactggactggaaacaatctgcctactttaggtcccttcttgatcactttccccgacacctgatcctgcacaaaactagtctgggagaaattaacattacaattattatccaccaattgcccaaccgaaattaaattagaagcaagttccagtgacacaaatacatctcagaagacagaattaatgtcaccaacagctgaaataaaaccaattggcactaagtaaagctgctcaacaaatatataagctgcaccccgagaattaaggcagacgatgtaagacttcctaacattttccacccgtctattttacaaaaatcatcatttattatatttccttgaaaaccttattagtttttggtacattaagttaatgttatatgaaaagattttatcagattgatgttgcttttaggctttgaagctttaattgatgtaatgatttggcatttttacattggaatgcacaaaatctccgttcaacgtggtttcaacgtgtatccaaacacaccctaacagattgaaccttattaagtgtttaccctgtgctttgtccttccatttttatctttgtgtcatcatttccaaagttgtaacagattgaacctttttcccatataggagaaaggaaggggtggacggcatggaaaaactattaatatcttttctattgcttctgggcacctgtaagtggttcgcttattataagttgttacaattttcctttcttgtttttccttttagttttgccttttaacatatgtttgttcaagtttggtcctttatttcgaaatttaaacagtgattactatatgtgatgtatcatgttggaaaaattgtcttgtacagcagaaaatatcatttattgatgttttatgcttcttcatggaatggggtcaatcatgtatgttgattcagatttcgtggaatgggatttggggttccattgcagaatacaatttcagtttcaagtgcctgtaattaataggaaatttagggacgttaatttcttgtgcaagttttactaagcacaatctttcaaacaaatgttatacacttccaaatgcatggtaactattaaactccatacttggattctataatattttttcatatttagttgagcctggtggtattttatttgtcatcagggatgcaatcttcactttgtgcttcttgtcaatttgccagatatgaacgctttatgaagattatgattctaagtgttctaaagaatactcatcgtccagttaaattctggttcataaagaactacctctctcctccttttaaggttatatatccacccaaattatatatgcttacattttaattcatttgtatattggaatgtaaagtagaatgatgagtttgcctgacatcctgaaccattttggttgacttaacatacaggacttaattccacacatggccctagaatatggttttaaatatgaactagtcacgtacaagtggcccacatggttgcataagcagaaagaaaagcagcgaataatttgggcatataaaatcttattcctagatgtcattttccccctttctttggagaaggtatcatggtttcttcttctgcatcaagttccatgcttttggtttttgtcttttgtacaattaatttcaatgtcacactacacaattcttaggatgttggtttgagcctaactcaaccccaaaaactagctcatagggtgaaggttgcctctcacttgtatattctatcttgggtttatctctatccaatgtgggacttgggtttttcccaataacaatgttatgacaaagataatgaagaatgaaaatcccttacaaggtaatctgtctaaaatctaccaatatatgcaggtcatttttgtggatgctgatcaagttgttagggcagacatgggagtactctatgacatggatataagaggaaaacccctggcatataccccattttgtgataataataaggagatggatggatataggttttggagacaggtaaatgtcactgtcgaaattctaattattgttcaattccaatctatatgatactcttggttttcattacgcccgtgtaattttaatgcagtattggctataaatatttgttaaccttttttccctgtgtcatagggtttctggaatgatcatttgcgggggaaaccataccatattaggttagtagctacttttatattctattgccaaatataatttcaatgcttactgtttcaatttcggttttcagtgctttatatgttgttgatctgaagaagttccgagagactgcagctggagataatcttagagttatttatgaaacactaagcagggatccaaatagtctagccaacttggatcaggtaagaggtttaagttaatagttccttttacctgcaaatgaatccttacttaagagagcgtgttgttaagcaagtttgactggtttttgtagtcccaatataacatgaaaacccagtgcattataaatgactgctttatatcaaaacttgtggaatatgcaacaacaatgagttgaagttttcaagaatatagatagactcctttctcgaggatctaaaattgtgtcccaattctataggaagattttaggaggtatttgtctttcactcagacaaaatgatgagttgggtattgatactcatgaccattatgatcataataaagcctctctcccttagaaatgtcgtgagtagcaaccacaaaaaaaaaaaaaaaaccttgcattcaccatcaacattgtatctcacacatttacagttctgcttcttcctaccttcccgtgtatgattgtttatgccactcataaagggagcgatgagtgatgtttccacgtttatcagcacagctaacaacactttgagaactttctgctctaagaatggacataatactgtcacaatcatcacgttcctggttgtcaaggtaatccacatcgccaatgtattcagcaataattgtcatatccttgattaggtcatcagcctcaacagtataactttcacacgaatcataaacaaccataaagggagggaattcacctcttttagacatagcaatgcagtgttctatggtctccatgtcttccttggaaagaatcttcatgccaccgttttttagtgtggcttgattcacagatctaggagcctttccaggcaagcatttgaggtgatcactgaattccatatttaatgctgttaaagcagaagcatggtctgggcaggatcttttgtaggaacaaatggtaacaatctcctctgtttcttatgtaatatcagaggtcgtgaatttttccaacacttggcatcctgagaaggacgcttgtcattaccatcaccagaactccctccaaatcccgaagaaatcaattcttcttttgggagaaagttctcaaagtcttgttatatgagctgataaacgtggaaacatcgctcactttatcagtggcattaacaatcgtacacaggaaggtaggaagaagcagaagtgtggatgtgtgagatacaatgttgatggtaaatgcaaggttttttttggttgctacttgttagatttgagagagtttaaagatagagaaatcatagaggaaattgtattattgagaaaaattcaaatcaacctgtatacacccccttatttatagattttaatacaaagcagctaagtctaactgtggaatattctagaatattagaattagttgtagaatattctagagtattggaattagatgtggaatattctagagtattataattagttgtgaaatattctagagtattagaattagttgtggaatattctagagtattagaataagttgtggaatattctagaatattagacatagttgtatataatgaaccctttgggtttcaatctgaaaaaatgaaaaagtgtgttcattacttatattccaacatggtatcaagagcagatttccctattatcgttctgcaactctgaaacccatttttttgaaaaaccttaagtcatctctctctgtcatttcccataaacactatctagtcacctccaattgcatttgttcctgtccttcacagtaacttatggattcttcttcttcatccggcatttcttctagtgcctctcctaattctgatggtgtttttatctctaaggcggagtatgagcaatttcagaaagtgatgcctcaatctgctgaagcaactagtcatgttgctcaacaaggtacgacattccatgctgatcgtagtaatcgttggattcttgattcaggggcttctgatcatatgacaggtaatgcaaccttgttttgttcttataccccttactatcaactgtcacgaataagaacggccgatggcaacttctttactattgctggaaagggatccattaaaatttctgaacacattactttgaactcagtccttcatgttccctctcttacttgtaacctcatttctataagcaaacttacatctgagttaaattgcgttgttaaattctctgtccatgcttgtgattttcatgaacaagactcgaggctgaagattggcagtgctagagaggaagaagggctttactattttgaaaaggatcctaatgaaacaaaagtttttgcacaccactcattatctttgactgatgattgtaatgatgttttgttgtggcatcgtcggttaggacacccaaatttcttttatcttcagaagttgttcccaaacttatttatcaataaaaaacccagttcttttttttgtgatatttgtcagtttgcaaagcattctcgtgtttcttatcctcctagagttcatcatgagttttctccatttaccttgattcatagggatatatggggcccaccccgtgagaaaaatatctccggtgctcgttggtttattacttttattgatgatcattctagggtatgttgggtatatcttttaaaggataagtcagatgctgcatccacctttaaaaactttcatgctatgattcaaactcagttccagacctttatcaaaattcttcgaactgacaatggtactaaatattttaattctgttcttggagactatctcacccaacatggtattctccaccaaaattcttgtcctaacacccctcaacaaaatggggtggctgaaagaaaaaatagacatcttcttgaagttgctcaagctcttttgtttaccatgcatgtccctaaacatctatggggggaagctgtcttgcatgcatcatatctcatcaatcggatgccttctcgtgtcctaaattttcattcccctttatcttgtcttaccgacgcctttccttttttccgaaatcctcttcccttcctctcaagttgtttggctgtgtggcttttgtacatattcctccccatcaaaggtccaagctcgatcctaagtctattcgatgtgtcttcataggatatcctcctaaccaaaagggttacaaatgttactcaccttctctccgtaaggtctttgtttctatggatgtcacattttatgagacacaatcctttttttcttcgacttctcttcaaggggagtctattggggtagatgaagataaatcttggaaaccaaatgagtctgttgttctacctttgcctttggagacagggggagttattgagcatgagatagggcgagctactgtgccaaaaactggagatcctcctggtaaatggggaaaaatttacagcaggtgaaaaacacttcaaaagcctctagactgccaagattctgactcgagtcctaattccaacaacccaatacctaaatacactgatgcagccgacctaaatttacctattgctcttcgaaaaggtaccagatcttgtactgctcaccctatttctcatcatatctcgtatgaaaagttatccccaggttttcgtgctttcaacactattttagacagtacaaaaatacccaaaaacatccaagaagcacttgatgacccaaaatggaggaatgttgtctttgaagaaatggatgcacttaaaaaaaaatggaacctgggaatctgtagcattgcccagaggaaagaaaacagtaggttgcaagtgggtgttcacaataaaatttaatgcagataatagcattaacaagtataagacgaggttggttgctaaaggattcactcaaactcatgggatagattatcaagaaacatttgccccagttgccaaactgaacactatccgagttctattatcatttgctgccaaccttgatgagcccttgcaacagttagatgtaaagaatgccttcttgaatggagatttacatgaagaagtttatatggatccaccacctggttttgagaaaggagacggatcagtatgcaagttgaagaagtctctctatgggcttaaacaatcacctagagagtggtttgaaaagtttacccaggctatgaaaggaagaggattcctccaagctcagactgatcatactctattttataaacactctgatggtgacaaaattgctattctcattgtttatgttgatgacataattgtcacaggaaatgattgtgaggatataaactctttgaagcagtgtttagctgatcagtttgaactgaaagatcttggagttctcaaatatttccttggcatggaggttgctcgtagtaagacaggaatttctttaactcagaagaaatatattctagacctgttgcaagaaacatgaatgcttgggtgcaaaccagcagagacttcaattgatcctaatattaaattgggaaatgaagatgggaaagaagttgacaaagagcagtatcagaggttggtggggaagttgatctacttatctcacactcggcctgatattgcatttgcgataagcatggttagtcaattcatgcattctcctaaggaaagacaccttagtgcagtttatagaatcctcaaatacctcaaaaacacccctggtcgaggaatactctttcaaaggggacacaagaggatgattgaaatctatacagatgcagattgggctggctcagtaatggaccgaagatctacttcagggtattgtacctatgtctggggaaatcttgtgacctggagaagtaagaaacaaacagttgttgccagaagtagtgcagaagcagaatttcgagctctagtccatggcatttgtgaaggaatctggttaaaaagacttcttgaggaattgaagatctcttattccctacctatcagattgtattgtgataataaggctgctgtcagtattgctcaaaatccagttcaccatgacagaactaaacatgtggaggttgatcgtcattttatcaaagaaaaattggaggatggtagtgtatgtttgtcatatatacctaccaaagagcagactgcggatattcttaccaaaggattacacaagccaacctttgaggatttacttagcaagttgggaatgattaatatttatctcccgacttgagggggagtgtggaatattctagaatattagaattagttgtagaatattctagagtattggaattagatgtggaatattctagagtattataattagttgtgaaatattctagagtattagaattagttgtggaatattctagagtattagaataagttgtggaatattctagaatattagacatagttgtatataatgaaccctttgggtttcaatctgaaaaaatgaaaaagtgtgttcattacttatattccaacactaactaaccccaataactagtgatatttccatgggagagaggctttataacaattataatggtcatgagtatcaatacccaactcatcatttttgtctaagtgaaagacgtaagtatctcctaaaatcctcccatagaattgggacacaatttgggtttggacgtaacttaatcccacaatgggatctccaatacacacccctcaccaaggactagatggctaggtaggcctaactataatctctaggatacactcaatagcatttaacaatttaggtttgggcctaactcaaccccacaagaccggggcttgtaaggtgagggttgtcccccacttatatacattactttggccttatcactagttgatgtggtatctccaacatttctcttagaatttggatttaaggcataactcaaccccataaaacttgcttgcaaggtgaggattacccaagccttataagcactacttaggccttatctctaatcaatggggatctcaatcccctaagagccgcatcctagtggctgcactctaccatgttaaactcagcctttctggtcttaggtagccctttttggcgtagggatgaccgcaattaaggaaactttccaacaacttcataagatggaggcataaggaaccatctctaatccacttacgattagtaacactactacatatcccattacccagaggtttcacgctatgcacaggtaagggggaaggatattgtacctaaccttatccttgcatatgcaaagaggctgtttctggagttgaacccatgaccaacaaacttaggattagtaacactgctctaaacaaaacggttaacctaaaacagtatgctgttaaacaagggccaaagaatagttgttttaacttttgatgtatatgccttatcaaagtgaattcttaaagaatatgtaacctcttcaatccgttaaccaaaaatgaaaggaaaactagggagcaactttatgatatgctctttgaatctgtctttggtgactattgatgagtgatcatattataaatttataacaggttgtataatttatttagagaatagaaactttttaatttgattatttcagtatgtttatacccattgatcaagatggtatttccgtatttgttggaaacattgtgtgatcactgtcgtaaaaaatttactggtaaagactgctcatgtacagcatgtccttgttggcaaggcttatggtatgtttggcggcttttttttttttttttttcttaaaagttactttcaagttaaagctaaattaagaactttaaagaaaaggtaaaagttgtttggaagtttttatcttttctaactaaaagctctttttaagttaaaagttgtatggtaatttatttgaaactaattatcaaagtatatttataaaacaaaaaaatattgtgttaaattaatttaattcatattaaatcattttaatgataataaaagtaaattaaaatattaaaataaatatattaaaaatttgaaattacttcaattaatataattttatttcagtgataatttgcaaacgaaagtacaacttatagaaactttctcaacaacaaaaatatattgttaagcataaggatttcaatgttatgggaagaataaaaaaagcagcatcattattccacagaaaagctgcaggggcacgcacatataagaaaggaggaaatgaatttattttagaaaaggaaatacatgaaaggccggtagatgggattcgaaggatggttgttgctagaaaagctccgcacaagctataaaaagctactccaaggagcttcttaataagctccttattttcatcttttagtcttaaaaataagctacttataattttaaggacttttatatatatatatatatatgagtgtttggcccagcttttaaggagaaaaaaaggcaaaataagctggtccaaacactaccttagtgttgaatcaatatcatttttgtgcaagttggaatcaggtctttccttcttaccatttgaaatttgaaaaaatatttcagaatttgaaagagtcaatttcataaattgtatgaagggctaaaattggatacttaggactgtaaaatcaagttactagtttcgtagtatatttcatattatttattatgaagattaatctttatgtacttccaatgtagccttcttctctcttttgaatgcatgcttttgtttttggtttgaggtgcctttttgctaaaatttgccctgaaatggtctaggatcttcctaattacgctcagcataccgtgcctattttctctttgccgcaagaatggctatggtgtgaatcatggtgtggtaatgcaacaaaatacaaggcaaaaaccattgatctgtgcaacaatcccatgacaaaagaacccaaactgcaggtaaatgttttgctgttttaagttgtgttcatggaaacttgtttcctatcacaacttatgtttttgcactcctctgtcttctatgtccatttttttactactttatctcggaacattagggtgctagacgaatagtttctgagtggccagacctggattttgaggcaagaagattcacagcacaaatcttgggcgatgatcaagaatcagaatcaatacaaccccctaatcaatccaaggacttcaatagtgaagattcatcaaatgaggacacggaatccagggccgagttatgaacaagggacagatgttgtgcaagttgaaatttattcaagaaatctatgatccttgcagcaatttgtcaccatgtagcatcatgacttctttccatccaaacagtgccaattccaaggtctcaaaggagatcttgattagaagaaacttttagtgaatttgaatcgtaccttcaatttgatgactgtggacatagtaacctattaggccatctaaattcattaatgttatataccagcaatcaacccctcaccttttttttttctcaggataattgtttaattcaatggggaagaatgctggattttgggaatgtcaaatattacagtgatagtgttaacttgttacaagtttgcttacagcatcaacataatctttggtgattattcatgtgtctctcacattgtgggtgcttgaacttgctggtaacagactggaatataagaaaaccatgttacttttgactgaattctgtgtctttcagcacccctaattcttacaggaatgtatttttcctgcttttatgtctaataattaaccgcgactcttgataaattttgactgaattttgctaaatttctatggttttattttatcatttgtatagctatgtagcatttttctataaacaattgtctatgatttctatttatacagttatgcacctacaggaatttgtcaacctctcttatccagccaatttttgacgaaagtcaattattatcatataaccacatcatattatgtataaggcaaatgctaattagtgttcttgattaaatagcattgattaaataaaagatttttattagaatatgtaaaattgggttattcataactttttttatgttatcttatgatattcataataaatattcataataagattctatctataattgtattataatttaacttgaatatcgatgaaaagttttcacattaatacgctattatattacttaaatggatttaatatttttatgtattgtcaaacacgttaagtaacaagacaatatatttggataataaagtgaacttctacgttaacaatgtttcaaaattaacttggtatactacctataattgaagcagagcattctgatcaacccaagactattttgttattagctaactgatatctagtaattagctttcataatcttttattgcgaactaaatcttttctttctgtgacttgtgtatctgtctatatgtcataatcctttcgaattctttttcattcatgctcaaacaatcttgtgctcatggacttaatttgtgcaattttttctataaaaatagtttttatttctactattcattcacccattcctttttctatactttcgcactgcttaaaatactttaatttatattcataattttattaataaagaaattatgtatcagatgaaaacagacccaatataactgtagcattcataatgaaacaatataatctcttgaagaataaccaaaaattgattattgtttattcatagtataaaaagtcaactttttcaacttactgtaagagtaattttaataaatatttgtacatattaaacattattaattcaatcattaaattaaaaattcttattcaataggtcaaatctataaattttaatatcatttaaaaattatctgatacttcgttatattaatttagtgtatgtatacttttaaaaatataaatgaatgttgactgtataggaacatatctagtgagaaagtcatgtttatataaaagtgagaagaacagtaaatcggaattatacaattataatgattaagatttgatgttatgtaaaaaaatttaaaaaatcatgattttttttataaaaaagaactcacgtgatttatatattttgatcttgataacttataataagatttaatagtaaatatttatcattctcacttgtataataataaaggttatcttactatcgaaaacgcgtgtatctaattttgcaattttgggtatatatgatgtgctcatgaactatggaaagtgacaattacaagaataataaataccttgcaacagacttcacaatgtcaaataaaagaaatcatgtataagatctagacaagtcaattgtgtggacaccaacaaaaacaaatctacataggaatgttgttatagatcatctaaataaaatgaatatggtcttaatttatgtgtcaaatcgaatcaattatacgtagaactagccacacacctaggacgacgatgagtcaatatcagaaataacatcactaatatacttgaatactctcaaggaaaaagtgattataagtgagaaattttcttaatacatgactaatatctatgaatatttgatttggtttcctgcacccttaaaatcagctaaactgtgggaaaaagcaatatatataagtgttgtcctttcagatagattagtttgattatgctttggtgcattatcctttcgttaaaacttagcctttcaaatggctattcttaatgtgtgcaatgatttggtgaaaataaatctacacaacaaaaactcagtcagaaaaaattgaagtcaaccttaaattgttattcaaagtgtgaacgtcaatagcaagaacataatgtgaacattatagtcattacaaaaacattacatatattaacaaagacaaagttattaaacttacctccattaatataatatccatttatcagaaaataaaattaaatatagaccttatattatgggtgtatagttgtattatactgcggttatagtcttccaattgaggtctaattaatcccttcttttaggggatgagttaggcattgttggtattcgtaagtgatggtttgttccgttcttgttttcactgaataaaaaaaactactgtggtatatatttatttattaagttgattaacaatttaattttaattaactaaaaaatatattaatgggaataagcttaacgatcaatatttttttattagtatatgacattagacatttgtttgtagtgaatatgaaaaggaaaaaaaaaaaagccgcaatagttttgagtttaatttgaggatcacagttgatatattcattcttattcttctctacaggatgagaaaaaccaaaatggacgacgtaccacgttttttaagaataccaaaacgaaaaggtgcagtgtgctcgtgtagaagaggttaaaacatgggccgagaagaaagagaaaataaaaaatagaaaagaagccgaagggaagcactttaaatgcaacagctagcgagccaaatccaaatagaagaatgagaagcagaatcttaagccaaagtagtcaatcttttatactccaacaagtagcagaatccaatctcatactgaaacctcgattcgatggaataacaaaagaaatagaaaaaccatcaagtacgagaaattggggtcggggggaactatttatatagttttcataatgcatatttttttaatgctctacatatgatccacagtactatatattcttaagattatttgcctctttctctctcttgacatttgtttgttcaataggaataaaaagtaattgcagcagattcccaatcatcctctccaggttttttatcaatctatattacttatctcctaataattcacaatctacattacttcttaatttaatttctgaactatactatcctttaaaaatttctgttttcagatccgattctccaccttcgcttaacccaacttctttattgagttttgtttaatgttattttgttaaatttaattaattttttatattatttaatttttagaatatgataatatttttagtttaatattttatatttatccataatacatcataaataaaatacatgaacaataataacaactttttcaattatgacattattgttgatatatttcacattttttttatatcttgttcaatttcttcatccattttcagtgggaatgtaatttgaaactgaactaccctttgcacttttccttttccttggatcatgacccattgatctccttcatattcttgtcatattaattcgtgtgacagtaaaccaaaggagttatcgtagacgcgtgcaatatgttttgtaaagtaaatagcggcacatagtttatgggatcaacattaacagatttataggcagtcattatatgaaaacacgataagtgcttagtctgaaattcgccactttcgcaattctaggattataacataactctaaactttccaggtgatataggagtttcaagtgggacttgagtctctgttacaataaatgtgttgttgtgtttgtcaaatttgttaacaatgtgcgtatttgattcatgttgacccctatttattgccttagagacgactttggaatactacgagccggagttgatcattgtttggatttgtcgacctctaatagcaaaaagttttgtggtcttaaaatacgtctcctcaacaaacaatgacacagacaaatatttttgtgcctttgaacatggaattaaccaaggatactggttacccaatattttttgtacaattaatcaagtcgttcagctacacttgacttattcgcacaaatatccccaatgttaatgtgtaataagcaatactgcttgttgaccttatagaattattatgtatcatcaatagaacacccgatactatactcaacctacttcgattcaccatcactagttcctactcatgatgcaatgttgtaatacaatagcaagtgcaagataccacgacaaggtattttttgggttactccttcactgaaacaaacccaaaaagatttaaaattccttcaatatgcagcatcaaaacacttaaggatgtcatcaagcaaattgtgcctttagagattccccttatggaagtcaccaatcacatgtggttagaaaattgttctttcgacagttaggccatacaaaatattaaaaaaaatcgaatatgaaataatagaatgatgatgaagacgtgttaaagatgttgccggaatccaactaccagaagtgtttttgtccaatataaattttagttatttttagcaaactagtaaccaaaccagcctcaattatcgatcaacatgttgcaataacctatgcagatgttgtgcataataaacaacttgctagaatgattcaaatggaagaagacatgtctgatgcataatatctttcaaactatgattagtatcatcattttcgtgtttcatttttattcttagtacatttagttatttttgttttattatgttctatttattatgtttgtctctctaattgttagtattttttgttatttgagtattttaatttttttatataatataattgagatttgataagtatatattcactatttttttaaccaatctattttttaatcactttgttctttttatttattttaacactattaattaattatttaagattactaataagttattaaaccaaaaaatattatcatttttaaattaaataatataacaaaattattattttaaattaaatttaataaaataacatttaccaaaaaaaaaaaaaacttagatgggaagtcaagtcctgaaaacatgacttctcaaaaatagtgtatttagagaattaaattaaaaagtaatgtaaattgagaattatttgaagataaatagtgtaaattggaaagaaaaaaaaaaaaaaaaaagcatccactccactctataggaaacagccataattacacccaatagtaactttcaccataccataaaaaagaagttagaatcctctaagctacccactttcttgattgcttaatctcttttcaacttaatcttccaattatataaatctatcaatctccatcaacttcccttcaacctttcatgatgagtagttcttcatgcacaaactcttctgtcaatggcttctacatcttcctcactcaaggactcaatgagcttcaccaatccttcctctcccatgacttcatgtcaatccaattcatttcagaggtcttctcatccctccaatccttccattcccagttaaccattttggtccaaaggctttgcttgtcagttggaggaaaatggctgaatgaatacatggatgaaagctcaaggctttgggatatctgccatgtactcaaatcagccatttctggaatagagaactattccttaactggctccaacatagcttcctcagtggatggctaccatcatttgactccagagttttcacatcaggttggtatatagtatatatacacctcaaattctgttcaaaattactttttagtcaaaagcttagtagtgcttttacaaaactaaatcaactttatttaattaatgactctaatagcgtgttttgattgcacgtttcagatgtgatttttcatgtttaatcagaagctaatagttatagctttcattaagctaaattgatgtgattttttttgttttttttatgagtttccaaacatgcactaaattcttctagaaaacatgtattgcaggttattagggccataaatatttgtcaaagggagagtctaggattggtagaggaaaataaaagcttgatggaaaatagaattcaggcattgtctcaatgtctaaatcagaacatgtgtatgaaatcaaagttaaacgagttcaatggcttccgaggtgttctttgtgcaatgatgagggttagctcattgcttctgatgattttgctatgtggggttgcatattgttggtcttcctcatgctttgaccaacaagggtatgaggggcacgtggagcacgtggtttatggctcaggttttatggcttctatggcaagattgcagcagaaagttgcacaagagattgaccagaataatgtccagccagggattctgcttcttgaattcaaacaagccaagattgccatggaggaattgaaagtggagttggagagaatggtgggttatgatgcacaatatgagatccaagcaaaagttgacaacttgaaacgttgctttgggttgttgagatgtggggttgagactataacagggcaacttgatgatttctttgatgaaattgtggaaggaaggaagaagttgttgaatatgtgtagtcataagtagatgtatataatttggtttagtgaagccatagcaaatgtggaaaaatacttgagagcaaaatgaagctctttaagggaaaataagaaaggaaaaattatgttgaaaaatgcaagcaatgtcataaattttttctggtcttcccttgtttctctttatttgctgagttgatggtgttgaggccttgaagaagcttttccaatgaaaagcaaagaaaagagaaaaaaaaaattgcaaaagagaatgtgatgcttgctttgaagtaaagcaacattactctcgtcatacatgagaaaccagaattttaaaatgccaatgccttcaagtaataagagaaacgtctttctagacagagtagtagtattcttttcctgtattaggtacatgggaaagaaataaaaaaaaaaatagaattcaaaagactagatgatatttgataataaaaatgatgctttttctttatcaatggagtcaagtagaatcttttgtcaagaataattagagatcaatatgcttctactatctttgtgtgggagaatttccactcaatatctcaatattgaataaaaattttatatcctgaaatattcaatattttgaacagattcatctgtattttacattagatatataaaaaaaatatgttacggaatacaaggagataaaatattgaagaaacttttgttaatgaaatcatgagtcaattacagataaatttaatacttaacatttatttacttaaaaccttaagacatcgagtatatatatttttgtcatttatatgttgttcaaaccaatatgagactttttactctcacttgcattctatcataatgcagattttatcaataaaaatcaattaaatgtaagtaaattttggaccaataaaccatagtgcaccgcacgttcatgtactcaaaccattcactccttgtaaaaacccagttacccgaatatacatgctattctgcaggttaaagaaatttctgtttgttagatttcatttttaaagatcatgactcaaataaacgtgttgctatattgtattattgtctttaaatgggtcgtttttagcttgtaaagaagagaaacagaattatgtagggaaaataatctagcctttctgcaaaggttaacggtatctgcagacatggttaagacataggacacaaaagagaaaaactttctccaagaatgacagccatataaagccgaaaaatatgaagtactatgtgaaatctacctttcaaataaagctttctagtcccaagggtggttgataactcaacaacaagaacagatcttcctctgttaaagttaaattgattgtctgggaaaagaagaaagtagatatgataatgatttataacatagaaaataggattgtgctgtctgctcactggacaaagggagaaccttagacaacaaatttatattttaatgaaatagcaaactttccttttcaccttgtttgacaatctcttttcacctcctttttggatatctaattttctactgtttttcaattaatttccttactttaaagtaaggatggcctagtgctaatttagtttaataacgttcggcgggggaaatctagtactcatatgcatttatcatgtttaaggtgaacggtcggggaatgaaaggaatttcttctctacatttaccttttttaaagtgtaggtttactttagggaataaaaatgcaaacatcaacttttatagaaaaatattaattgttaagttttttttgttaataaaagaaattgaataaattatattttcctctcttctttcttttttcatcaccaaggcaagtttgtaactcccaaaaatacatatacatcttagattatatttgacaaaactagttgaaaagttagtttcactaaaattaattattgaaatagctgaaaaatgtaaaataacataaaaataatgaaatcataatttatttaaaaaagataataagaaaatttaatatatatattgaggataaaaatgaaaaaaaaaatataaaaataaaaaattagaaactagcattttaaaaaatattacttaaatgacatttcaagaaatgttagaatctattaagaagttattaaaataagtttgtttatcgagtttttcagctagtaaaaaaactaaaaactgactaaaatattttgttaaatttaaccttaatgaaaaggaatgagttatccatcctaatatggaatgaactgggagtagatagagaaaaattggaagaaaaaaggaaaggtagaaaaataaagtaacatatatgatgaatgctatgataaaaaaaaagaaaaatattgtagttttaatgaaatggaataaaagtagataaatgattataattttgaaaaaaaatcatgttttaatattaatgcacatgataaatttgttagaattttctttaattttttttataatttttaatttttatttataattaagatagttttatttctagcatatattattttttttcttatattttattctacaggtaatattataagattataagagttaataatcttataatgcataacaatcaataattaagaatatgtttagattcctattaaaacctaaatagtgggaataccaatgcactttagcatagaaataataaaggtgatgcttctccaaaattacggaagacaaccaatagtaacctctaaccaaatatgcactaaatgatatagtctaaaacttttacattacaaatactatatttttattgattttttaataattgtcccacctttaataacctcctctttttaaaggccataattttttttctcgtaatcaaactttagtaatataatgctggaaatccaaacagaaaagtaaattaacttgtataaaacaacaacgaatgaagacagtttagtattttagcctcaagattaggatattaattagcttggctttcaattccgttcgagtgcgtcaaatagtttactttcaacatctttaatcgatataatttaaataattcattttaaattctttactttatattaatttattcttataaattataatatcacatcatagttaataaacaattcatattttactccaattatataattttaagtgattcttaaattatttccttaaagaatctctaaataacaagaaaatatttttttactcataaactatcttagcttaattttaagtaatctaatataatataatatgtagatcatctccaataataataaaaagtaataatatttaaaaataagtaactcgttgaacaacgaagttaaaaatatctagtatagagtctgcaatgattaaagtcaaatcccacctatatatatatatatagagagagagagatgggatcattttataccggtgtaaaactttatagttttacaccgtttaataactttttactgaataagtattttacaaaatccaccgttaaattaaaagcttatatcatgtagatcatatgtatcaaatttcacaaaaatccgaaatcatttgaaacctaattgatatatataaaaattaacggtatatgtacttctaaattatgtaaaaattagactattttgattaggtttcaaattatttcagatttttgtgaaatatgatatatgtgatctacatgatataagctttcaatctaacggtggattttgtaaaatacttatccaataaaaagttattaaacggtgtaaaatgatcgcatctcatatatatatatatatcaacaattagcaggcaaagattttgttgcgcgattatagttaatcttttcccaattattacttgcatgaagcaaaaagaactctcgaactctcaagggcagagtcatttttttattttattttttcttcttgcagaaattcgaatttagaaagctaataaccgaaggtttaattataatatttaaaaattcattaaaaaatataatatttaaaaattgcataaatgactcaaaagaatcagttaaagatcaacatcaataatatttttaacttaaactaattggatttataatagatgaagttaatgataaataaataaaaaagttataaaaaataggagtatggattattaccttggattaaagataacaaaaacaaatataagcatgaaagaatagatatgacatattctgtaatcagttatcacaaagagatccaagcataatccccttaatgtcgactccaatattcagttgtaaataatacgcttgtctttatcaataagggtcactatcaaagtctcgtccgtggcagctccattgaaaatttgtgaaaaagtgcttcatttgcgttgtaaaaataggagcattagtgattacttttcgcgaaaatacattgtatgtgccaaaggaagttgacgtttcaaatgtcctaacatagcgtaccaccacctcccttgtgttttttttatgtttcccagtttatttcttgccgtgaattgagattaatcttgaccaagtatgtaattacaatttacagcttccatgaaaaagagaattaatgtgtgactaaattacattgatatatggtaagaatgatgaacacgtaggtatagtactatagttggactagcaatgctatctaacatggagaaatatgcatgaacctgagaattaattcgggggacaaaagcaaggtcagacggatcattttgttccaaaccaattaaattaaagtaggcaggttaggatcaggttgatttttgggaattttaatgtttagtctgaatagggtgtagttgcattgaaaaataaaggttttaaaatattcattggaaaggtttgaatattgactgaaactaaacgagttttatgattttttaccctacctcatctatccttcatgctttaagtcgagtcagacttctcaaaaaaaaaaaaatcaagtcaggttattgctcgaacctttatccacctctactatttctgagacatgcaacaatttttaaggtgttgattaaaaattgaaagtaattcaatttagttattttgtaatttcatgaaattgttctgaaattataattataatggtgcattttagatgtcaaacaagcattaaaggctatgtttggatatttaatgatggaagaaattgaagaaaatgagaaaatgcaccaggaaatatatttaaattgttattttattatttgaagattttgtgataaaataaaagaaaaaaaatgaaattctttcgtttgactttacttcattctattttctttcatgaaagatttctttctaaaatggtaacagaacaatcataatacttgcatccacaactagtaattagacccctatatagttttcttctcaaagaaatcaaaaaccaagaaaaggccaaatgaatgtagatatagcaatctgaccctaaatcactgcgcaagatagaggcaagtgatgtgttaatgtgtcatctattcctatcatagctcattgctttgaagactgaacataacatcatattcagagggagaaaacgaagacctcttataaatcacaataatgctgtcacaactcaactacaaactttgtaccatatcaacaaaaatgtacagttcaactttatgtcataaaactaaaatttgatacatagatacaggcaaaacatttaccttaagttagtggggataagtgaacaacaaatctaatttattatccaaaaaaatgaatatggttggtgcttccttgactcgcttctcataaatgatttcatctacctcggcattatcatttcttcccttccccaatcaatctctcttatagatttggactggaagttgcaggtgtagttttggcctcgttgacaatgttcatgatctcttctatacttttaagaggatattttgtattttcttcactgtagtaaacatcttgagccccttctctcaattccttaggcaagttctttaaaaaccatggatgtagtgactttatttccttcatgatgattctctgcaacataattataaggcatagttacaataacatacaccaagtaatatcatgctacagttataagtgtttttattttataatgttccctccaaaaaataattaaatgactatgttcatatacataccattgctggatttgccacaaaaatgcgggatatcagatttttactgtcttgagatatgcaaactttgtcagggaacttgtattgaacagccataactctctggataatatatatatatatatatatatacacacacatagggagtcagaaagagtacatataagacatgatgattcatgaatctatcaacagagctagttcaaaaataaaaagtaaaatagcatatgtactaaatggtgtaaaaagattagagatttcacataagtttgttcacttctataatgattatcttaagtcatacttaagataatttctgattgattgacacttgacggtctaaaaacttttatactgatagtatataaaaattaaattaaaaaaataaagcaaattacctttatggttttgtggagattttggtatcctctttgtcctcaaatggcaattctcctaccagcattatataaagtattactccgcaggaccatacatctgccaactgaacaggtacaaaacagtaacacatcagccaaaaaatgaacaaaactaccatataatacagagaaactcatcaagtcagaatcagtaactctaaggcattttaagtgcttcatagtagtcactaaaatatgttatttctatttcactttaaaaaggaaatgtcactgcgtgtgctaagtgactgttgaataattgtatcagtctataattaatacaacatgaatcttctagtctttttcatgatctaaagttagaaactgtagtattacgaacctctggtgcaatataggctggagctccaatcattgaatgaggcctcgaatgaagtaggtatgactagaaaagtaaaggttgtcttgtcagaataaaaaattatcaaataatgtatatttaaatttaattggttatatgtttaagcattcaaggttggtatatatgattttgtcaattgaaccttagaatatccgaaatcacaaattttaagattattagcagggcttccatccaataaggtattctccaacttcaaatctcgatgacatatttcatacaaaataaaaaaacatatcactaccaacacactgaaaacaaattacaattcgttctcatagtaatgtactaatgtgtatttcatctaccatgctgtggctataattaactcctgaaatcaactgctggaagaaatatcgagcctgaaatatgtatacacaagaagaatgagaaagaaattgcatattacgaacagtaaccatgacttgtgaacattggaatttatttattatattatacttttatagaagagaaatgctaccagacaagctttcaaactaattgatcgtggtcgtacgcaaccaaattaatttgattttaaaatgtagtactaggaaagtgactcctaggtcgtctctcaaggatcaattgtcaatgtttaagggattgaaaacgtgttggggggtatttggcagaatgcgagaattctaaattaaacagaatgtgaaaactaaattaaacagaattaacaattaactgcagtaattaaaaacaagtcagacccttagaacagattgcgcctctaatttcctcggttcacgaaagataacctgtcctgcttaatccttatcagtccagattaatcaactaagcgaagattaatctaaaacgtcattacacgaattaagcaaacgtgaacctcgttagggcaaactctcagaattaagcaaactgagaatactgaatcaatcaatatcaaaatcattaagcatgactctaattcgaaaaatacagaacagaaactcaaacaaggaagaacaagcagaaaacgaattagaagaacaagaacctccattaaaggtctgcaatctgtcctagggtccaaccctaggtttagccttccattaattcgaaattaacaacagaaacgtaaattgaattgaaacgaaacattaaacaaaattaagaacagaaacgaaattaagaacagaaacgaaattaagaacaaaaacgaaattaagaacagaaacgaaattgaaattgagaaaatgaagcagaaagcgaaaacaatactgaaactgaagcagaaaacgaaaatattaaaactaaaggaaaactgaactaaaattgtattgtaggctgtatgttcttgtctgtctgttgtgtgttgtgtgtattgttgttttgtgtgggcacaaaaccctcaatatatagtaactgcctaacctaaaagaatggaccttttcctaacaattttggcccaaaatcactaaagataagataagataatataaaataaaaacgaaatccatattctgatatggaaaatattaagcataaataaaaacgaaatctataatttgatatgggaaatattaagctgatgctgacgtggcgcactaatcttcagtccataaattaattccaagcctaattaattattaatctgccctgaaaaatcaaattagaaataattaacttaaaataatccaaattaattaaaattcgaattattggtctaattaaatcctaaatgagaaacaatgcaaaatataaacaattaagcacaagttagggattaaaatgagtacagaaagatgagtaaatagtgataaatagtgactcatcactaattctttattattcgttgaaattatctaattaatcaactgtgcaaaacctttttattctaaccgaacatacccattaatatcaattttttggatactctagttattttatattaattaatccaagaatgtttagcattttcaccccactattatttctaatacagttttgttaatcactgtatatggttataccattaataaataaatattgaaactcattatgaaaatgcattgataatatgaaatacagtaatatacttttagttgaatatatttaatatatatatatatatttaaacaataaataaataatatgttcacatacaaacatgataagttaatgtatgtttatatgggtccatatgggttagagtccaatagtttactatatcattaaggttcttcctttgctgaaggtaacactattgaacattatacatttgatgtctcttagtgtaatacttcaagcatccaacactaaattattctctcaaactccttacctctaacaatcttgaagtattagcttcgtgtgtcggatttgagcaaataaggtgttatttcgaagatctcatcaagagcaactcaaaggtggtatcactttcgtgttttgacgaaaggattaaccgggatctgagtttgaaaactttgttgccgcaacctttgaatccagatcccaaaaatttcaaccgatttcatgagttaaaaccttgcgggctttgttctactctccgagacgatcattttgactggtcacttgcgtaaaacgaaggtcggacgaatgagatatagtcgttggaagtttctacagttttccgatgactggtttgttttctagctaccggcgactttctggcgaacaaaaaaagtcgttcctaaggttttttgggtatttcgaattcatttttaaggtcaaatttgacaaatttcacctctataatgttgtttaaaaaaaacgttagaagatttgatatattttggaggattttaaggtgcactctttctaactattttactctgattaaaatggaaaaacatagctactatgatatcataaagctgaaatcttttgatgtcactgaattttatggttgaaaatttcatgttccatttggcatgaaggaacgtgacatgttctacactgtgttgagtaattttgcatctattgttgaaaatgtggatgaatatcaatggattaaagataaagatttttgtataaattacttgttaaactctttaaatcctcgtctggatatcacttataatgagtataagattgcaaaagagatatgggatcacttgaacactcaatttcaaaagcaaaataggctttctaagattcttctagggaagaagttctttgactttaagtttaatatgaatttcaaacatcacttttcaattaattgaacttgagaacatgaggaacaagctaaaagaggacaattctaatttatctattaatctctttgttggtattgtgttgagtaagctatctgctaaatgaaattcttttaagactgacatgcacagactaaaagaacagatgaaaccggatgaacatatgagatttgtctgataatccattcagtaggtactcaacataagaccaatcccatatgttcatccagtcttatctgttcttttagtctgtgcatgtcagtcttaaaagaatttcattcaacaagtagcttactcaacataagaccaacaaaaagattaatagaccaatcaaaattgtcctcttttagcttgttcctcatgttctcaagttcacttatttgagaagtgatgtttgaattcatattaaacttaaagttaaagaacttctatactagaagactcttagaaagtctctcttgtttttaaaattgagtgctcaaatgatctcatatctcctttgcaatcttatattcactatatagctagacgaagatttaaagagtttaacaagtaatctccataaaaagtttcatcgtttaattcattaatattcatacacattttcaataatatatgtaaaatcacttaacacattatagaatatgtcaccttctttcatgtcaaattgaacatgaaattttcaatcatgaaattcaatgacatcaaaagatttcaactttatgatatcataggagttatgttttgtcattttaatcagagtaaaatagttagaaaaaatgcaccttaaaattctctaaagtatattaaatcttctaatttttttttaaaaaaaatagcattgtagaaatgaaatttgtcaaatcttactccaaaatgaatatggaacatactccataaccattttacgtgaaatttgtcacatcttttgcaaacttggtcatacagctgtccacccgctacatactccataactattgtaagatgtgtgggagtcaaggccaccttcaaagttcaaattccatatagaacaaattatctcaacataatactaatgtactgtataaacacataacgagtggttaaagacattaatgaccaattaatattattcattgaatatttctaatcttttgtattattgatttcatttaaaatttaacttattcactgttatacttttcacttatattatttgtaatcttacccaatgctattattttatgaaaaaatatattatagtctgacattatatataaaacagttttattttatcgctgatcaatcacaatctattattatataagataaatttattaacttttatgaaaattaacctaaacctcatattttataataatagaagccaagcaaatattttgaaagaagagagggagagtaaaaacagatcatacctacttgaaccgaacaatattcggatgacgaagagaactaaggtttacgatttcccttgccaccttctcaataatctgcaaaaaagtgttaaatttgctttgaaaacaatgtttattaaagtgaatgggtgtttgtattttttaaaagcaagagatctaagtcacgttttatttcacagattatttctttaattttgagattttttttttaaaatataacatgaaaaatataattttaaatattttaaaaatgaataatatacccatagttgtgaaatcagatccgatcattgacccgatcgaggtagtagaccaatggtctaatcggtgggtccttaattaacctgatttgactcattttatctcggtatatattaaaaatttaaaattatataatattatttgattaagaaaagtctatctatattccaaaatccaaaataacaattgataataatccaaattttttaaaaaataaaatttttaaaaataaaaaaagttataaaaccggtataattaaatcagtccaactgagatttggtgatcttcttggtcggatttgatcgggtcatcccgagtcaattacacaacttattcaataaagaaaccgatccgattaggccactaattcttgacccaatcagtccaaattgtcgagacggaccgattttaagaacactaaatatactaaataataattatttattaccaactaataaacgtgagaagaaatttttttaacccatatttgagaaataaataaataattccttaaacaaaatctcaaattcaaatattatagatgaaaaaaacataattaaaaagaaaaattttcattaaaaatatcagtcaagtcctaataaatagagacaacgacgccacagaagaaaaaaaaaattaccgaaatgctatgtgaccaaaacatattaccagattgtcacgcgtcatattttgctagacctcctagcgaattacacacagcacataattcgctagagggagtagcgaattacgtataatatataataaataattacttccactttccaataaataactgcttccctacttccactttccaataaataacggcttccattttttcataacgtatcttatctctttatttttgcaaattttttcaactaaattggatggtaagagacagatttttattcaaaataatttttaaaaaactatattgtttataaaactaatttagttaataaaattaattttcaactaaataaaaaaatatttgaaaataaaaatacatttagaaaatctatttaaaattgatttaatttttataatcaatttaaaactgattcaaaataccagttttattcaaaatgatttttaaaaaaattatattggtttaaaaaactaatttagttaatagaaataattttcaactaaataaaaaatatttgaaaataaaaaaatagtaaaaaaatcaattaaaaattgatctatttcttataatcaatttaaaattgattcaaaatatcggtttttattcaaaataatttaaaaaaaattgtattgttgtacaaaactaatttagttaatagaactaatttttaactaaataaaaaatatttaaaaataaaaaaaaattaaaaaatctatttaaaattattctaattcttattataaatttaaaattgattcaagatatttcaaatttaaatcaacaattatttggaaaaaaaaataagtgaaacaatttgaaacgtagttggtttgatttttttcaaatattttttttcaaatatttttttatttaattgaaaattaattctattaactaaattagttttgtaaaataatacagtttattttaaaattattttgaataaaaaatatgtcggttaccattcaatttagtttaaaaagatatgcaaaaataaatggatgaaatatattatagccttataggaaagtggaggcaattatttattggaaagtgcagtagttatttatgtcatatcaacataccgttgctagctacaaagagtagcgaattatgtgatgtgtaattcgctgagaagtctaacgaaatatgacgcgtgacagtctgataatatgttttggtcgcgtggcatttcggtaattttttttccttccgtggcagtagggtcgtttgtctctaataaatattagttacaaacaaaagagatatatcaatattattattataataataataataataaaaaataaaaattcgtctcctagggtttatgatttccctttcctccatcaaatcattcggaaaacaaaatacaggtgtttacataagtagcaacttaccttgtcttcccgtcagatgtatttccgtcagatgtatttgacggcaatgagatctttggtttctttgtgacgcataagccgtatgaccgcgtatctcccaacccctatgtccccattcactacctcgtacttctccatattcacacacaccttcctttctgtttctttttcaaagttctaacaccacacttgatcagccaataactactaactaggcactagcacaaatcactgatcaatcaaactctaatcgatatatatatatatatatatatatatatatatatatatatatatagataaatagccaagctgttaaatgatcagtcgcgggaagaaaaacgcgcattaattagagagatacttttcaatataaatcttccaaagtgtgaatataaataaaaaagttaagagatagaaatattatcgttattattagataatagtgatataatcacgtatcttaatagaggaaaacggataataaaatataactttattgaagatgtgagatttttttaactgagacaaaattataaagctaaattattaaaaaacggtgcaaatatatatatatatatatatatatatatatatatattaatagtgatgaagttgtttcaaactcaggatataatgggaaaatcaattgaataataatctaaattcgaagattttttagataaatataataaactaaagtgttacggtttgggccagggctcaattgttatgaacgatcgtgccaataacttatctatggaacgtggaggctgacctggtccatgatggacattgagaacgtgcaggacgaggccgagaattcagggagcagttccaatgcccgttatgaggtaatctgcctataaatacacattaattcctggtgaaaggtacacacacactctagctttctctctttcaattacacagagcacacactccactcccattggtgtatctctatgatcttctgcttcaaggtatcatcctccattgatatccttggacttgcagagttagagtgatcagacagtgaacacgtagcatcttcgtgctatacagttgtgttctgggaaatatacagaacattggcgccgtctgtggggaaacgataaaattcgagtctcacacctttccacaatggtaaacacaagaaatagccactctgtaccacattcagagacgccgaacagggagatttgcctaccggagaatcagaacgtggcacggagggaaaaagtacatgtgacggaagctgtttccgacgaagcttcctctcccgcccagacagaccaacagaggactccagcagtgcgaaggatgggtcaggagggggagctcggaggacaactcgtcagcaatgtcctcaattcaatcctaacccgaattgagaacatggagaaacgacaaaatttacagagacaagaagacattcgaaacattactcgccaaatggaagaacgtaatgaggagtggagacgtgtcgaaacgcaacgaatggcacaattggagcagcagctgcgaatgataactgaccgggtacaaatttcaaatcctgagggcgagacgcaggatctgaggatgcacctgaatcaaagaagaagtacggacctggagagtcaaagacggatagaggagccacaagatttgaggacacacataaatcagagacgagatgtcgacccgggagaccaaaggaggacagatgagccgcatcagagtcaaagccgggcacgaaatgaggcacaagacgaagttgacacaaaccatagccctgacgaaaatccgaacatacgaacgaaacacgacgacaatcccattttcagggcaaacaatgagaaggttccgcaaaacggcggacacgataagccgggagaacagaattttcgcgaaaaaagcaggaccagtgtatcgtcggaaatatagccggggacagcaaaacaatagtccattcgtggatgacattgtaaaggctagatatttggacgactttgatgggtctttcctatcaaaatatgacggaacacaggacccgcaagtgcatatcgatgaatttgatttgcagatgtgtgtccggggcattgatgagcccataatatcgaggatattcgtcacaactttggcgggctcggcgcagacgtggttccacactttaccgcctaggtcgataaagaattttgaagactttggccagaaatttttattgaattttgagaccagcaaaaagcagccgaaatccgagttcaccctgggtaaagtcagacagttacccgaagaaacgctgcagagctatctggatagatttaaagaggccgccttgcaagttgaggggttagaagagcgagtccacgtatacttgatatcggctggactcgacggttcgtcaagatttgccaagtccatttataaggacccggtgaagtctttgatggaatttcgtgcccgtgcaaagaaatacttggaattggaacagatggaggtcgtcaacaactctggacgaggaaaggagcgtcatgaaaggaggagctcacctccgaaaaataggggatacccggagaatcgagctcggaataatgacccgaaaccccgaccagggagatacgaaaacaagtacgagaaatacactacgttgaacgtatcccgttcacaaatctggaaggaggtcgcgcttacagagatgaagaaggttgaacaaccccgtccagttttcaacaaggccggattggataaatcatgattctgtgaattccacaacggacccgggcacaccacagatcaatgttgggatctgcgggatgcaattgagaagtttatccgggaaggaagactcaaacagtacgtcattcggacacaaggaaggaagaacaaacggaagggagacgagaatcaacataaagacgaaggaaagaaaccccgggaagataacgatgagatcccggagcccaagttcgaatgtaacgtaatctcaggaggcatgggcggtggcggggatactgccactcaaagaaaaaaaatacctgaaagaagtgctatcggtccaggcacaacccaaattcaaagcccggattggaaagccataacctccactcttgtattttaccaaacaagacatggagggggtggtacccggacatgaagacgggctggtgatatcagcaacggtgggaaattgccgggtaagaagaatgtacgtagacaacggaagttccgccgacataatcctgttgaatgcatttcggaagatgaaattggatgtaaaggaattaaggccgtgcaaaacaatgttgatcggtttcaatggcggcaacacgaatgtgatggggtctatccgtctgcgtttaaccctggggacgagagaagcttacaagtctgaagaagtggagttcatcgtggcagactttccatcccaatataacatgatattggggagaccaaccattcataagtgggacatcttaatgtccacaaaacaccagaaactcaagttcgttggcagcaacagacaggtggtaaccatatgcggcgatcagaaagaatctcgacaatgttactacgatacggttcgaaaaagtgaaagagaagccaacgatgacagctccaaccgggtacgttcggtaaatgtcgtggaactggatatgcgagaggccccggatgagtggagaccggaacccgcagagaaagtcgagcatattctgatcggagatcaggccggtcaggtgaccagcattggtgaagcattggaacccgaactgagggagcaattgatccattgtttaaagaaaaatcatgatatattcgcatggaaggcgtcagagatacccgatgtcgatcccgagttctgcagtcacaaattggcaatgtacccgggatcgaaaccggtggaacagaagaaacggaagttgggaccagagagagctcaagccttgcaggctcatattgacgagctgttgcaggccggtttcatacgcgaaatccaatataccacttggctgtcgaatgtcgtaatggttcgtaagccgaatgggaaatggagggtgtgcacggattacaccgacttgaacaaaatgtgccccaaagacgcatatcccatgccaaatatgtaatgccccagctacaaccgaggtcattacctagccttaagcactatcattatcagataaacatcagagttaagcagtttggaagcatacaataaacataaacagggcatcaacaaatgtcgtcatcatatacactgtacataagtcatggtgaatatacatcaactgtagtgtcttatacaaaactgtacataacttccctctatggggtacaaaataaaaccaaaggcatatacaaaatatatgagctacaactcatgttatctagcctatggttttcagatccagctatccctgcataggcttcttgccttgggatctatccgctccgctcgatgattcacctacaaaacatagccccatacacggggtgagatataaaatctcagtaaactcagggcccttgaaggtatttccttcccttggttcactttccaacacataataacatcatcatcataaccatatcatcaagcaaacacaatatcaaatcatcatccacctggccacaaccaagtgtctcaagcattacctgaccacaatcaggttatcaagcactacctgaccacaatcaggttataaaccactgcctgactacaatcagactgtactcgtgacataatatcgtcacatcaataactgtcatgcgaaggctacatcgtagtatataggaacatctcctcacagggaggctacctctatataccaggcacatctcctgcataaatccctagcggaggcttcctctgaatatacaggcacatctctatctcacgaggctcatctatatatatcagacacatctccttttggtgaggctacctctaggtacataggaacatctctcatcaaagaggctacctctatgtaacccaaggccatctcatcctctatcaccctaccattgcctggggaggcttcttctgtgtatatgggaacatctcctcgtaggaggctacctccatatcacaggctcatctcttaccaggtctttctcaatcatctatcctactacaataggatactattcatccaattctaggattcacatatcatcccctttcaatgggttcatcatacattgtaagtcattcccccatcaaagggttcactacacattcatacataacatgccctcatcaagggttcaatcaacattccattacatatcacatcccctcatcaaagggtttaactatacacaatatatataatacttccccatcaagggttcagtttacatttcaagcatgacaaaccattacaggccacacatattatccccctcatcaaagggttcagctcacctgtcatacaagtacaatgaaggcatataatcccctcatcaaagggttcaatccacgtattcaagcatacatatgcattacacaacattccctcaccaaagggtttcattcgcattcaacatatataatcatccctcatccaagggttcaaaccacattcgatacatacatatatagtactccctcatcaaagggtttcattccacatctcatacatgtgccacacacatacaacatatcacaatataaccattctccatctggagcatggtggaaccaagcaaaggacacacaatcaaggtccaagagcttacctgctctaagcaacacatcggctttcccggtctcgtggctaccaccaccagagatatcaagctcacgtcctaaaaagcatacaatcacatatcaaataccattctatccgtataacgcataaatctctagcaaaacatgcggaaaagcataaactgctgcataaaattctgcagattttacacccacttggaaaaatcacaaatcctcgtgggaggctcctaaaatcacgagaatttagaggcatcaatatatatctcttatattttaaacaaaactggtttcatcaaaaaccatgaaccatagcctccgcggcaaaccgaaaaccagaactgtcacacaccaaaatagtgctgacagcaacagaccaactcaaccagccatttttcgaggactatccacaccaggtcacttgtccaaatgagctgatattttacaggaatgaatttcacatacccatctttctatagcctttgaaaacacttgatttggaccaccctagacaaagttatgctttctgcaaaatggttctctgcagcagaaaaatctgctaaaaacagagtataacagcctgttataactctgcaccacaatttctaggagactccaaaaatagcacgaaaaatccagaatgaagctaactctcttagctttcaaatggaaccggtttcataccatttggacaccgataactcctgttatgagcaaaacaccagaactgcccaagtggtgttcttggctgtcatgaacttgcatgcttgatttaagcatggaacaccatttcaacttaaaaacaacttctacccactccaaatcacacatcaaaactgtctcaccctcctaaaactcagcattcattaatctcactccaaaccctaaccctaactcaagaataaaggggaaataggaggagatttcaaacattagggttcaatagaccaaattggagggtagaccagcactctaaggctctcactcgcagtttagcggcgccaaacaaaaatgggcagatttgaaacccactcttctcttcaaatcaccaacacccaaagctcaaagcaacaagaacaaggaaaaagagctttctttctagcttatttgtgatttcagccactaatctcatggaagtggtgagaagagggcttgagagaagagaagaaccaaagaagaagaaaaaaagaagaagccaacaagcagaaaacgtatctgctggcttttaacaagaaacagggggtgcgttcagcaattactaactgcacctgcccctccgacaaagaccaaactgccctttcgtaaattcgtttaattacgaaattatcacccaaattaccttaattaaatttagtgatattacaaaatatagaccaactggtggacaattcatccgggtacaggatattgtctttcatggatgcattctccgggtacaatcagatcccaatgcacccagacgaccaggagaaaacggcgttcataggcgacaaagccaactattgctataacgtcatgccattcggcctcaagaatgcaggggccacatatcaaaggatgatgaatagagtattcgagtcgcaactcggacgaaatatcgaggtctatatagacgacatgatcgtcaaaaccacaaatgttagcaagcacgtcgaggatcttgaagaaacctttaatcgattacgaaagttcaacatacggctcaatccgttaaaatgtacctttggagtcggggccggaaaattcttgggtttcatgttaacacacagagggatagaagctaatccggataagtgtcgcgccgtgctggatatgcaattcccaaccagcaaaaaggaagttcaacaattaacgggtcgaatacccgccctcacacgttttatgccaaaatcagcagagaaggcgttgccgttcttcaagatgttgaagaaacaggccgtcatagaatggaactcggaatgtgagaccgcctttactgacatgaagagatctttggcgtcgcccccagtattgtcaaggccggaagcaggagaaacattggtcatgtacttgtcggtaggcgaagaagctgtaagtgcagttttagtaagagaggtagagtccacgcagaagccggtatatttcgtaagctgagcattgcgcgactccgagttgcggtatcaaaagttggagaagttggtcttcaccttgatcgtcgccgccaaaaaactgcgtccatattttcagagccataccatagtcatacggacagatcagccaattcgacagatcctacataagccggacttggcaggaagattgacccactgggccgtccagttgtccgagtttgatttgaaatttgaggctcgccacgcgattaaatcccaagcgttggcagatttcatccgagaactcaccccccacaccccgacgatcggagagtggtggactctatacgtggacggatcctccaacaagaaagggagcggagccggaattataattgagaatccggaaggagtagcaacggaaatctcactgcaattaggctttccaacgtcaaacaaccaagccgagtacgaagccttgatcgccgggctcttacaggcaaaggaacaggaagccaggaatgtgaaagtgtacacggatgcacagttagttgcatctcagatcgaaggacgatatcaagtgaaagggccattgctggcaaagtacttgagccgagtaaaagaactgatgtccgagttcggcgagattacggtaaatcatatcccccgagaagaaaatgcacgggctgatatcttgtcaaaactggcaagcactaaaaaacccgggaacaaccgaaccgtaattcagcaacagacgttgcagccgacgtgcataatgatgattaccaccgatcatgattggcgacgcccaatagtaagctatttggagaaggggacattaccagacgacgagctcgaagctcgacgtttgatacgaacgtcggctatgttcacgattattgacggggagctatacagaaaaggattgcatagccctttgttggtatgtgtggccccagaccgagtagaatatatcctatctgaaatacatgaaggaattaacggacaacacatggggggcagggcactgacgaggaaggcactccgggctggttatttctggccgacaataagcgcggatgccgccgaacatgtgaggtcatgtgaaaactgccaaatgcacgcttcaagggtattatccccgcctgaagaattgcaatccatctcggcgccgtggccattttacaaatggggcatggatcttttgggtccattcaaaccggcagaaggacagatgaagtggctgatagtcgccgtagactattataccaagtagattgaggtggccccctcgaccacaatcacttcggcccgagtataaaaattctttgagagaaatataatttctcagtttggaattcctggagaagtaatcactgacaacaggactcagttcacggacagaggatttcaagagatgatggctagtcttcacattcgacaccggttcgcgtcggtagagcaccctcaatccaacggccaagctgaggccgcaaacaaaacaattctggaggctctacggaagcgaatgtatgaggccgggtcgacctgggtggaacaactatattatgtcctatgggggatccgaacttctgtccaatcgtcaaccggggaaaccccattccggatgacttacggaaatgaagctatgatcccagtcgaaatcggacaacagtcatggcgacggagtcaaacgctgcgagacggagaggaaacaaacaatgaagttttggctttggagtcgacactcattgaagaagtccggataacagcgcatgcccgggaattaaagatgaaacaacagatggcatgcgcctacaataaaaaggtggtcccgcgacagttcaaggagaccgacctagtactgcgacgtgccgacgtcggaaacaaaaacgcccgggacggaaaattagcagctaactgggagggcccgtatcgggtcactaaaaaattagacaaatgggcgtatatgttggaaacattacaaggcaaaccggtcaagcgaacatggaatgctgacaaattgaagaaatattacagttgaaattgtcgaccttctttttaataggggtacgaatccaaaaaatgttgcatctgaatccgtatggtccctattcatcaagggtacacgaggcagtagaacaatgcaatctcggtatcgagggtatggactcggaatagatatatccgagcccatatggtcctctttcacgatgaagacattgttaatggatacgaactcgaaagcctaccttctgagcacatcattttcactttgttgaataagttatatcgttgtaattcctaagtgttagtctgatcctactcggacacacatattgttatcgtaacaacgaatataaatgcaagtattattgattaccataagtattgagtcattctatacgattttgtggtatggtaacgactataaataatacgctaaacggccctgatcaggccggataacggattcattagtgaagttgtttatggtcagataacgtgaacaataagcaataaatgcaaatataatgaatggtcgttggaaccaaaaagatgcgcgcacaagatattttatgaatcaagtaaagagcttgagcaatatataaacgaacctagtaattgttccgggcaccgggcccaataaagaaaatggaaagtaattgttctgggcaccgggcccaacaaaaaaataaaaaacacaagtaaaaaccggcatcccggcccttcaatttggtggaggctgggagtcagtagcagattgcggcgtagtggtatcggaaatggggttggcaccaggttgggtggcatcaacggaagcagtggcatcaacggaagcaccaagagtaggttctcccatcgacaaaacttctgttgtagtcgccgaagggtcttcagatgcaggaggggggaaaagttgtccatctttgacatacgccaagaaatgcatcccggcattagtcatagctaccctggggttcaaaaatgtgatctgttcaagggcgttgctgaagccttcctcggcagcatcacgaaaggttgctttcatagcagctagtcgaccctcgtaatcctggacgcaggcttctttgtcggccttgacagaatcgagggatgaagtcaggagggccaccttctgatcggcagcttcaaggaaaccttgagacctcgccaaatctacccgcagggaggcggcaacagcttgggacttgggtaattcctccctcaaaagcttaagctccgccgccgactgcgtttgaagggaagcaagttgagcctcaagggaaacaagttcttcacaggccttattcttttcccccaaggctctatccttttcctccaaagctctatccttttcctccactgcaaccccgtacctgcgacacgaatacttagaaatatatacattgtacaagtagagataaaaggtcatgggtagaacacatacctttcccgaacaagggtaagcgcccgagccagagaagcactgcggaaggcatactcctcgatccgaactatttcggtcagttcttcccccaccggggcacccggtttaagcatgtatgcggggggcttggtcaaacggatcaactcttcagtaaccccctttttccataaattgtccgagcgtacccgcgtttgaagatgctcggagtcagaggtaggggtagtacgtgggcagccttccgccacagtaagatccacggtttcgaccaccgaaaccggggttagagttgttgaggagggaggctgtggagcaggcggtgcgtctaacgccgttccttgggtaccctcgtcaaaaaacgccctgtaagaagggggaccacgttttttagatggggcaccaagtttgtcagtggccgacctcttgcccttgcccctgacctcggttggtttggagaggtgggcgacatcagttttggccttaggaggaggtcgtgatcccattccggctacaatcagaaaacattacaattaatacaagtaagtacaattgtaaactaagaaaatgcagttatcaaagcagaccgtttcgacgaccactgccaatgtagtcggaagtcttaggctgaccatgagtgcctataaactcagatatcacgaaaacagaagaggcgtccgagtcggaaagctcctcctcgacaaaacgataattggaatgatcctgtttgtaatgatcatccgaccaatacaaaggaaaaactcattccacatcagatgactcggggccggacaaaaagaagggttgccgatgaggttccgcggcaaccttaaagtacttgtctttgaagccccggaaggagtctgaaaaaggatcgaagagttttcgtttactctgactacggaaggaaatccatcctttccgatcagaaggctccttacccattctaggggtatgaggagaatagtagtagaagaagaggggaactgtgcagggaattcctaagtctgaacaaaataattcaaaagtacggataaacccccaactatttggatggagttgggaaggggctacccggaggtgatttaaaacttcaatctcaaaggaggaaaagggaaaggtaatacctatttgagttatgacatcttgaaaaaagaagaagaagttgggattgttaccctcccgttgagcacaaattggctcaccgggtaggggagcctgaagggcgaacccatcctgcttccctactggggtcgacactatgctgggtaggtcgaggatggaagaaatgcgaaggatttcataagtgacccaagggaacttagacgctaatgctgggggcacatctgaatgggactctacagaagcagactcgtccatagtttccgaagtaacacccattatacctacgaaaatgaagtggggaaacaaaagttagcaaaacgtacctggaggtaacgcattaaaatcacaagaaaccgaggccgaaactccgtcgacgacagaacgagtatgcggtcccggttgcaaatccttggaagcaggacgcaaaatggggttatgacgacatgacctaaagattgaatcagcgacgtcgtcggaacctatttgaacataatgaatggcctcggacacacaatctatacatgcatcgtactcaacctccattacttcaaccgaggacgaggatgattcctcatcggaagaaggagagaggctaaccggagggttaggatgacgaccagagactactaaagaaagatcttgtgggttaccaatatcaatattgggcccaagaagagaagagtccaaagaagataaagtcctggaagaaattgggcctgatactgggcctaagggttttggcttagggtctacaggaaccggaagaggcgagagaaatgaagggaccgaaccgccaagaggggtggtgattttttgttttccggaggaggaggaacctccggtgtgacggcgaagggggtcgttttcactttccctcgcaggaagtggaaggccaaacaacaaccaagcggctctagggccaaattttttccttatctccgcctcttcttcaggagacattcttagggcaaattaaggaaaatcaggaaagactcgaaggggaagggaacgatatgagcacaaaacgcgaagaagaaaaacccagaaatcaagaaaaagccggaaagaaaatgcgatgcacccctaaaaaatcctgatattggcagaatcaagataatgcaggaacactaaatgatacagaaagaaaggagaaagaaggtacctgtggtattggggaactggagtctgaatggaagaagaacgaagggggaacttgaagaagatgcgagagaacactcgaaaagttgatgaaagagaagagaggatgtaatatcagggaataggcagaagtgacaagtaagggaaagagtaggcacgaataaactattttgaagataaaaatttgaaatatgagggtaacttgcagtaaccgccagacgaaaggaaacggttcagtcaccacaatgaaacgacacgcaggggtagcatggtaaaagcacgtccaattataagggcaggaaagtaaattcacgacaacagtaatcattaccagacgaatgaaggcatttattgccattaaggacggaaaaagtaaccgatttgaatcaggaagtccagcagccgtttcaaatacgccataaaccattccgggtacattactcgtccaaggcaaatccggccacatctattcggaagtttggctggcgacacatttgattatatttacatttagcagaatcggaatacatatgtccccaaaggtctagtcggaaatattcgtatacccagatattcacgcgatttcgaaaatagactgaataaagcagttgtaggagtatgtatccgaacgcgtggagaattgtatccggatgaacatggtcggatatgttgtccgggacactgtggatagatgagattctgtacaagggaagtcggccaatcgtagtctgatcaattgtagtcggtttgagtgtaaccccgaagtttgcaaatcaccttgtacatcccggctaccaagtatacttggcaaccgggctggggggcaactgttatggtttgggccagggcccaattgttatgaacgatcgtgccaataacttatctatggaacgtggaggctgacctggtccatgatggacgttgagaacgtgcaggacgaggccgagaatccagggagcagttccaatgcccgttatgaggtaatctgcctataaatacacattaattcctggtgaaaggtacatacacactctagctttctctctttcaattacacagagcacacaccccactcccattggtgtatctctgtgatcttctgcttcaaggtatcatcctccattgatatccttggacttgcagagttagagtgatcagacagtgaacacgtagcatcttcgtgctatacagttgtgttctggaaaatatacagaacataaaaataaagttatgataaaggcatttataattgtttgataaaaaaatcataaattaagaattgtgataaaaataacatatttaattacgatcttaattattgattctctaatcaaattttactataactacttggtgtgtttagataattttttttttaatcagctgtgtttagataagattaattgaagtgagtaattcaatttatgtgaaaatttagaatttgtggtgttaagatatattatttggatagtatatttaaaatgtgagtttaattgttatacattatggtataagtgtaaaaaaattatattatcattcaattaaaattttatgataattgtgatttttaaagtaattaaaataaaacttaaacttttttttaaagatataagattttataattgattgacgtgcatactaatgagatccttaaaaatatttcaaattctaataatttgttaaaatattttgagtacataaaattataacatcttaaatctcatgcaaaatataataatttgaattatttatgctcattttctttacctatctcctattttcactcctcacgtgcctttttctcttctatcttctctcttctctcactgatctctcctctctatacttctccttccctctttttcttctctctcccctctctttccctttctattcatactatcaatctattatacttaaattctgtttttaaaaggaaatgacctttgagacatttcatggctacctatagaaggtgtacttggttttttaatatgattgaaagcaacgtaaatttttaagaaaaaaaattgttagtttattttaaaaatttgtaatttattttaaaataatagtaacaataaaacaattttaataaacaagtataaaataaaataaaatattttttatacactgctaatataaatatttttatattattaaataattggaaagcactccaaaagtaataagacagtatttaaattctttataatatatttaaattaaatttaaaaaataatcatttccttagaaattgaaaatacttaatataattataatttccggatcccaacaaagaatctatttttcttttagttgttgaatctcatggtaagcacatttttttaattaataacaaactgtaaaaaaaattatttatgggtcgaatcgacttttgcggcattaagtggctattaaccgaggttgtgtgtacatctatataattagtaattataaattttcttatgcaattagtaattacaagtgaatgaaggaaatgtaaattttcagaaccaaatcattaagattgagcaaattataaagattttccaacattgataaaaaaaaaaaatcaaatggaattgtaatgaaatagaatgaaattattacgtgggcatgacaatgagacggtcctgagatgagtttgattttctccatttccactaaagttgcgacaagctcgggttcgagtttataatacgagggaaagaaaaattaaactccacctcatatttatcagatttttatcactatcaggttagagaaaatttaccaggcatctatttcacactttttaaaattttaatttattcaaatattttaattaaatcgtagttatcatttttgtgtgtggaataaatcattgtttacattttaactcaagtaatatatatatatatatatatatataataaatatttaacaattaaattatactcgatgcaataactattattagtgtctttttttttccatctagacatgatacaagactttaagtcaattaattttagatttttcattgatacaaactttataacatttgaataatgcccttgtagtatttctagagatgttgttttcctaggccgtttggtagtgaatttcttaaaaattttcataatcttaaagtataaattatgttttttatgtttgatatacaattaataaaaaattgtcacaattcttgaacatcaattttacatctcattctcattcttgcaaaaacattcttgaggaggggggggggggggtagaatccaattttttcaagtggagaaaaaattttagttacatattttatattaatattaattttcaggcattttatacatttatatgaatcatatttcttgggtatgaaaaaacttcttccttatcaaacatcctctaagaacaataggctctaagaacaataggttgaaaaacttactttctcatgtttttattattttgaaaaataacattcatagaaaatgatgtttctcaaaaatatttttaacaagttactaaaaaaaaattacattagggaagacgagaatcttattttttttcaagtttaatttttattattatgatagaaatatcatgttattttttatgaaattatataatatggtaaataattaaaatatacataactcttttgattcctaaaaaaattatctaaatttttttaatagccaacaaacataaaatgaaaaaactttcccctcctgtaaaggtagagatcactttcattcccccaaacatacaatttgggtgaatgtcattgacacctcttatttttaatctttacatcccaaacttttttcttacaaaaatatccttgattgaaattagtctccgtttgtcaagatatttaacgaaactagtttttatcaaatcaattacacgtaaaaaaaatttaagaaagggaacgttgttgaagaagtgacaaggtagcgaaacctcacatgaagaagagaatgaggaacaaggaagagaagtgtttgtagaagagaaagtgagaatatgctggaagaagataaggaggtggggttgagacttgatagggtgcttagagagtgagggaaatgtgaagaatggggtggaatgaaaaattcacaatagaaaaaaaagtgaggagtggaaagacgaaaaaaagggtggtggtgggggagggggtgtgaatactgaatacatgggccataatgtaactcacgtactggactatagattggaaaccaaatagcccaagatgtaacttcaccgtcaaagtcacagaacacggtttcaccgtattaccccaaaaaccgtaatgaaatgaaaaaaatttgcactcatcgtcattattcatttcatttcagtgtagtcgtaacgtaaccttattttctctttcgtcgtcgacaacgtaaattaccattatagtccgttcgtgcttcctctgttgttgcgttgttctgttgtctcttctttctctttctctcttctagttccatcactgccatgttcttcgaatcccgatccctcctcttcccgctccttttctctctcttcctttctcccgccttcgcttcagagtcagatcacaaggtaattcctcattccacaaaaccctttcccttctttcgattcgatctacactctctttgctgcattgggatttggatctgcctaccgcgtgcgtttttagctcttacttgcactcaatttcaatctcttagcttcggaattttttttttcttccggttttaagattgtaatgtaatggttgtgttttcctagtgttagatctcaactgggtttttggcttgtgctcacctaggtgtctttgcaatgtgggtgtttgctgttcattgtttggccttttctctgctaattagattcaatttgacttctttgtccccttttactagttcatgatcttggatcatctgtttttttttttttaaggttataataattaatgctgagctagttttggaggggatttgaaatgccgagaggctgtattgtgactagtgacgtgggaagtgggaagagcttacattgtgattaggctttggtacctagtttgttgttgttgtgtgcatccattgtcattgaatccatagaaggacccattaagagatgtgtgaaaagagggttgtctgaaattggacagaacagaaaagaaatttcggtgttgtttagaagtctttggttataattgtgatgtcaacatggaagctatataggtttttgttatctatctgtactattttcagtattgtgaagattgatgtggagaattatagccctatttgtgtaccccatttttaagattcaaagtttttaaaacaaatttaacagttgctagtcatatctgctgtctgatggattctttttagaactggaacggttctgatgaaaaaaaattgatctgtaactaattgaatgtatgtaatatgtaggattctctgggcaaggttgtaaatcaaattctaccctaacataagaagtttttaatggtggatcagtttgatttagagtacttaagtaatatttaagatcagcacatcatcttatgagttgcatgtttttttactctaataacattgttatctggttctctgaatacaactggcttcctagacaaagattctagattttaattttctaacataaatttgatatccaattgatgtggacacccattacatgtttgccagaaggtttaaaatatagagttttaagctttgccaatgtgtggtgtcttaatatttctcccagaagactatcatagattatataattgattatcattcagtgaactgaaatcaaattgttaatcatgtcaataacttagtatatgttgttcttctctttttctttctataatagtcagttgtgacgcttatccccacccctatactatatttgttatcctggaatttttccccactgagctggtgaaacagattaaatatgtatatttcatttgtagtatcaaatggtgaacagcttctgtttttaaaaggatgtattttattttgttgcagtatcaacatgatgaaccagttaacctttgggtgaacaaagttggtccttataacaatccacaagaaacatacaactattacagcctcccattttgtcatccatctagtagtgcaagtgctgcacacaaatggggtggtcttggtgaggtcctgggtggcaatgagctcatcgatagccaacttgaaattaagttccaaagtatgaaggtttctgtcgtactatgtatttcatagaagagcagtcggttggcaaactggctttaatggatgctattgtttttcaggaaatgtggataagactgtcttttgccagatagatctcgatgaagcaaaggtgaaacagttcaaggatgcaatagagaataattactggtttgaattcttcatgggtatgttttgctttgtgtgtttcacttattactatgacaattgacaacttgtagaatgattgtactttcaagaaatgttggaagcttgcagaaaattatttctttggtcagtacggtaacatgaagaataaaataaacacaacatcaaaatgtatagcagaagcaaccagaaaacacctaaagtatatggaaatttccaaaatatcttatgcttattctatataaaaattattgtaaaaattatattataaatattatgatatatatatatatatatagtatttttaaatatatgccatatatataaattatatattagtatcttgcaaaggggtaatattgtcatttacatttatattttatatcatttcctaattcacctcaaacatagcaaagggtagcataaatatcatataatagattatttggtgcacatcaaacattgaatagtatataagcttattatggtcttagcctatcctattcttatattttatcttgtctatcaagtaagcccttatagtttttcataagcattctagaatactttagtgagtgttaatttctataatatagtcactattacaactgaaagtattaaattaagaactctgtgtgaagtaatttcttaagtattttcaataacttagtgttaattaatcatcgatattattctgtcttgattgtcataatgttgtgaggattttttccaaaggatgatcttccttgtatgtttttaattaaataatttaataattattgaattctctttcttttttaactgaattacttactagcatctgttcttatttcttttggtctgctatgtgatgcactaaacacaagttcagatgatctacctttgtggggtatgtccagaactgcctcttctcctttctctttatttaatatgattttgtacttaacatgttagtcatttatctaagacacttcttttttcattttaaggatatgttggtgagttacatcctgataagaacagtgataatggcaagcatgtcatttatacacacaaaaacattattgttaaatacaaccatgatcaggttagaagttacttaaatatcttatgctatcttatgacatgttatggatcctttaagtttcatattaaggtctgtttccttgcagattattcatgttaatctcactcaggatatcccaaagcctttggaagtaggaaaacatttggacatgacatattctgtcaaatgggattctaccaatatcactttcgggcatcgctttgatgtctacctggatcatcctttctttgagcatcaggtacagctttgcttttaaaattgaaatggtgttgtttatggttttgtgaattgctatgcattcatccatgttggtcctaccatagctctgtcactgagaattttgctcctttgttttctttttccctagattcattggttctccatttttaactctttcatgatggtcatcttccttactggtttggtgtcaatgatattgatgcgaactctgagaaatgactatgcaaagtatgctcgggaagatgacgatttggaaagtctggtgatggtttcgtgacttttatcttaattatttgtggaatatgaatcctttcttcctagagaaagcattgtggttctaattgtcaaatatttggtcatttcttccatgcttacaggagagagatgttagtgaagaatctggctggaaacttgtgcatggtgatgtttttcggcctcctcgcaacttagttattctttcagctgttgttggcacaggtgctcagcttgcgttgctggttcttcttgtcgtcttgttggctattgttgggatgttgtatgttgggtatgtgcataaccttcaactgactgaagcataagttggctagatgtaataagcatgtggcagtgcttgcacagttggctatttctacttcatactagttggaatactttctgttgtttgctcctttctctttcgttgattatcatgtaagtttccttcgttgcttgtctcaggcgaggagccattgtcactactttcattgtgtgttatgctctcacatctttcatttctggttatgtgagtggggggatgtactcccgaaatggtggtaagaatcttctttaattttctgtatattcgctccaagtgtgtttgggtggctttgtctcggtcttctctttttggttttcaatgattatgtaactaatttttatctgtttgttaggtaaacactggattaaatccatgatccttacagcttctctgttcccattcatgtgctttggaattggatttatattgaacacaatcgctatattctatgggtctctagcagcaattccatttggcacaatggtggttgtttttgtcatttgggctttcatctccttccctctagcacttcttggcacagttgttggaagaaactggagtggtgctctgaataatccctgtcgcgtaaagactattcctcgtcccattcctgaaaagaagtggtaccttacaccctctgtggtttctctgatgggaggactgctaccctttggcagcatattcattgaaatgtattttgtattcacttccttctggaattacaaggtgaatcacggcactactatgacttgtttctgtgataaagtttcttttttacttattggtttggttataaaagttattcgcatgtcaaaagagcagagcattatcaaggaaaataatactagaaactggtctttttaagtaaaaaaaatgtgtaaattttagtggaagctgggtgaaccttcacattggcttatatattttttctttctttgtggcatacaggtgtactatgtgtatggctttatgctgctagtctttctgattcttatcatcgttaccgtttgtgtgacaattgtggggacatactttttgttaaatgctgagaactaccactggcaatggacttctttcttttcagctgcctcaacagctgtttatgtgtatttgtactcaatatactacttctatgtgaagacgaagatgtcaggcttcttccagaccagcttttattttggatacactttaatgttttctcttggactaggaattctatgtggtaagtcttcttcaatttgatttagattttcaccctgcttatgtgattggatatcgtatctagtgctgattaagccccacttgggttataatttatctttaaatgtgcaggagctgtgggttttctaggttcaaatttgttcgtgaggaggatctacagaaatatcaagtgcgattaaggttttctgagtcagacctgagcacttccataggtttgttgctgaagacaataaatttttggaggaagcctctggtcgtgtagggaacctaacaatgtttacaggtagaatccacagggtttttgagaatgaggatgtattatttttctatattggggaagccctgagattctttccccggctgtaattgattatcttcataattttagataagtagtacaatattcaactcttgtggttactgtttcatccccttataaaataggggtcccttgaaggactgatgtctaattccccaacatgggtttcaactattcaatatatgtaaagaggggatgaagtctcggaaatgaattttgtatgaacatctgaatatcattcttatctgcttccttaacttttaaatgataaataatgtttgtagtgtctttaccgtttagtttattattataaaattaacaatggttcgatcttgttgctgctgtgacaactatgagttgctttctgaactttgtggctctcatatgtacgtaattccctacctgttactgaagtggagttttgaaaaccattcaagtagatagacctcttgcatccaatggctataaacttgtttaagtcagaaccatacaaaaaacttgttccatttgaacattaatgatacgagggttgtgccaaccactatttgcgtggtgataaaggagataataaacccatgcatacaatgctgccacgtggcagatagggttggatgcaacttcaccttgttatgtgttgcaagcacactatttccacaagcccacacccttaataagttgtcacaaaacacaaaccaagtgcatagcatattccagtgtttttcatttcattgtgcattcaatggccaccacagcagctctatccggaaccatggtgagcacctccttcatgaggaggcaacctatgaccaccacaagcctaaagacattccccaacgttggtgaatctctttttggtctgaaaagtggacgaggtggtcgtgtcacttgcatggcctcgtacaaggtgaagctcataaccccagaaggaccagtggagtttgaatgcccagatgatgtttacattgttgacaaggcagaggacgaaggcattgaccttccctactcgtgcaggtctggttcttgcgtttcctgtgttggcaaaattgtggaaggtaacgtggatcagtcagatggtagcttccttgatgatgaccaaatagaaagtggctgggttctcacctgtgttgctcaacctaggtcagacgttgtcattgagacacacaaggagggagagatcgaatgatcaatatatatatgatgtaatcttatccattgctattctaattctatctatatgttcaatttttattttgttatagtgatttggcattggctagttagctagctgaaatcatgaagtgtgagtttattactttgtcatatttgcgataacaagtgaaattgttgcaccttaattcattagtttgatgatgcttttcttactgtttatgcacaatagtttttcttaatctttttctttcctctttaatgggtcggggtggaataagagtttaattttaattttggcgattcggaattttcttcatgcaccagttgaatctcaaatatattattcaaattttgtttaatttcaatattttttttttacttcttccttcctttcgttttccatttctttttacaccatttaatttcttcttactttgctgacattctccttgtgttggcttgtggtggtttgttacttgttccattgacttcatcgtcattgtcatggtgggtgttgcaatgacaacgacagacatacgctttttacatatgtgaaatactaatccgtgaaatattaatccgtattgtccatacaaattgacaatccataaagtccatacaagttgtcaatatgtaaagactatacggattaccaatatgtataagcattataaatttttaaaaaaaaattataatgaatttaaaaagaaatagttaaattacaaaaataggtcatattgtataagaaaaattttatttatttatatatgtgtataaatattattacactaataacattaaatgtttatataaatagtgttttcaagtctagaaaatttcaaaataaatttttatattgatttttaaatatataaaagtatcaaaatagttatttataatatatttaaaataataatgaaatatggaaatttagatataaatcattatatatatgtgtgtgtacgcactcttttataaatttcaatataatatattactatattagtatacatttgaatagtttttttttatattttttctagtaacaaaaaaaacaaattgtatgtacaaactaaaaaatttgatgtaccaaaaaaataataaaattgtgtcatactatatcttaaaatatatatttattgatatatctacatacatgttacattagtatctttcattgtttcattgatattttttctcaagtgtaaaagattttaaaataaatttctacattgaagtttttaaaatatatggatttttttaaaataattagaattaattaaaagtaataacaatggatatattttattaagagataaattattattatatgtatatacaagtatcaattattatatgtcaatccgtatgggctatagtatcgaatttcattagtatttcttaatttgtcattgaaatttttttctttttaatgttttgttaagatgaacaaagatgagtgaatatatgataacattatgtatgaagaaattaatatgaatgaagataggggagaggaacctgttgtggttgacaatattgattgttctaatgtctcaagtattgatatgattttctatttagttaaagtaagtaaataaatgtcctaacaagatgaaacatgtattgtccttgttgtaggtgttccctacccatgatgacatattgcaatgggctcgtactgttgcgtatgatattggttttgtggttgtgataatgaggtccgacacatcaactggaaagagaggaaagacctcatttgttttaattgattgtgagaggagtgaaaaatatagagcatacatgatagatttagtacggacgatgactagcactaaaaaatgtggttgtcaagctgtgagcgaaaccaatcctgggaggtgaagggtggatgatcaacttaatatgtgttactcataatcatgcattgactaagtcattgagtggacatctatatgttggtcgattaattgaggatgaaaagattattgttggtgatatgacaaagtctatggtcaaaacaaaaaatattcttttaactttgaaggaccacaatgccaacaattgtacagcaatgaagcaattctacaatgcaagatatgcatatcattcttctataagagacagtaatactaaaatgtaacaattaatgaagttacatgaactcgatatatatatattcattggcatagaatgaaggatgaagatgtatgtgatatattttggatacaaccggatgcaataaaattaagcaatgcatgtcatttggtatggaaggcacatataatgggtagaagtaacaactccaagcaactcaactaacaactccacagtctgctctgtctcatctacattgatgcgtctcatcttatgcttcttgtgtagtcactcctagcaactcaactaacaattctacaacctactctacatctattgcatcatagatatggaaggcacttataatgggcagatgtaacaacgatgccacatcatcaaggctaatactcatctcttctatgggcatatgaaaactattagtttccttgtgtcatctcttcgcaaaagcagacaaaagtcctctgtctcttgtctccaatgaacatgtaatcagagaacttaagctcgaaccaaccactaaatcttcaatttaggtgcaggtcttcctaatttctcaaccttcctcccatgagaggccaacttcaagtcaatatgttcttgcaaataattataattaattaggtaaattaaaatgacaaaaaaattaaatgttataattaaagaaataactacctctcatgtccacactttagctgctacatgatcaacatatgatgtcaacactgatgtatcttagggcccgcctgaaaaaccctatgaatcaacacctaaatcttccgtaactggatcgtgaggctctttggcagcatgatccacatgcctaatattctcaacaacagttacgtgtcgatgttgtcagccttcagtgttaagggcttcttcctcatcaccactaacctgtgtgcctaaagcctgacgtaatcctctcattctaatcataatctaaaaatttgccctactattagtctaatacttcaaatcaacccacaacttcaagaaaatactcttaaattgaaaataaaactatactagtatttattaaatgtagtatattttaagaaatgtagtaaaaaaagtttaaattaactttaaataattaatcaagcagagtaaaatacagtttgatatttgacgagttttaggttaatttcttaaaatatttaatagatattttttcaatttgaaaactttttctatcattaattaaatattattctctcgctctaaaattgcatcaaaaatagcaaaggaaaattatttattaagcatgttggcaagataattgtctttagtatttagtctttttcattcttgagatttttttcctagatctataatctttaattaatggaactaataattgatatcatgtaccaacaaaactaaaagattaatatgaaattatagttgtatctttgataagatcacatagttgtacatttcaaatctcttatttaaagtctgtttaaaagaatttatttgaacttattttttgacaaacacttgtgtaaatatctgaaagtttttatgaaaatagattataatatgttaagctatgtcaaatttatttcaataaattctctacaatagcttttgaaaagatcttacaacttatatgaaacaattaatttaaattattttcatgagtactcattcaataagtctttaattaaattgtttatccaaatgaatcataattatatttgaaaatttaagtgttaatacaatacaaattcattaactataattttttttgttttgaacctatacagattgacaatctgtatgacccgtatagatcaatatttcgcaaatgtattgacaatctgtatgacccgtatagatcaatatttcgcaaatgtaaaaaacttacctccgatgttgccaccgcaacacccaccaccaccacgacgaagtgaatgcaacatgtaacaaaccaccacaacaatgtaactaacaaacctccaagagccaatggaaggaggaggtcagcaaaataagaagaggaaactgaatggtgtaagaagaaatggaaaacgaaaggaaggaagaagaagtacaaaaggacaatgttgaaattagacaaaatttgaatggtgcatttgagattcaaatggtaaagtaagaaaatccctaacaattggcaagtaacatgactagcccaattgtaatgttttgtgtataggttttgatagtaattgaacaaaatatgggtgaaccatatctgataattattaacaagagaagtgataggaacaatgttaatatatattttcaattaattcacatcttctcaccatattattatttcttttgtcaacaatactctttcaagtaattcatactctttataaaaaaaatagttaatttagttattgatataaaatttgtccacaattttgaatatatgaggacatacaaacataattttttttaaataaacttgtatgactatttgtcataacatgacaagttaataaattatcaacgtcgttgttaagtcatcatttaaaattgttattacttgagagcaaagacaaaaaaaaaattaaggatttaaaatcaaaacataggaaaaagactgaaaattatgatggtcaaaataaaagagatgtgaatggaagagtaagagagagatggaaagaaagaaactaagttaataaatatgataaattacttaaaataataataaaatagataaaaattactaaaaatataatggaagaaaagttgaaaaatgttaagtgtccttataaagtttaaggagaaaaaacataaatgtgaaaaatgttcatgatgttaaaaatagattaatcttttttccttttattaaacatttccacgtgtatcggagagagaggggtaactagaagagagcacgaagttccttggttccatgcaaaatgtctccaatctctcggtctctccatcagcttccacctcaccaatctctttctttatatatttgtttataattttgtcctcccatgcatggatttcgtttggaatatgccaattcaggaaatgaaaaaccaagagagagatgggttccaaacttcttccacgagatttgccaccattttaggcctaaaaacctctctcctgcttcttctggacgtggtgttggaccatgctctgaactgcaacattgttacatgaatccatatacacacaaatttcctttcttttcttttcttttccctttttttacttttatttcttatcattggcttctgctcctctctttgtcaaagatgctgacctctgagaatttgttgaagaggcatggtttccttacaaccaaaagatgatgatgtgaaataactgaaaggatcataaggtgatcaacatgcatgttatatatttttgaaaccattttccataatgctttttgcatctagaatttggattttagcacctgaaaacaaagtgttctaatttagaaaacatgcatcttttttgagttctcaggttgaaatggattgtcatggtggtatttcccaaagctttccaaacagggagcatgaaggccttaatggaccggttttcttacatggtgacttggatctgttgataatagaagccaagtctcttccaaatttagatttatccacggaaacagttagaaaatgcatcactatgggcaacatgtgccaccctccatttataaaaggactaaagacacactctggaaaagacaagatgataactagtgacccttatgtttctgtatgcattgctggggctaccattgctcagactagagtgattgctaactgtgagaaccctttgtgggatgagcaatttattgtgcctgttgctcaccctgctcaaaaacttgagttccttgtgaaggacaatgatattcttggggctgaactcattggagtggtggagatacctgttcagaagataattgcaggaaatactgttaatgattggtttcctatcattggtcagtatggaaactgcttaaaaccttatcctgaattgcatatttctgttcagtataggcaaattggagtgaaccgttcagaaagtattagtagtggggatggaaaagcattaggagttcctaaaacatatttccctctcaggaaaggagggagtgtgactctatatcaagatgcacatttacctgatggtatgctacctgaaattcgacttgagggtggaaaagtgtttcagcataataaatgttgggaggacatatgccatgcaattttggaagctcatcacctgatatacattataggatggtcagtttaccacccagtgaggcttgtcagagaggcaacaaaaccattgccttctgggggagagctttcacttggagagctgttgaagtacaagtcacaagaagggctccgagtggttatgctgatttgggatgacagaacttcacatgacaagtttcttttgaaaacagtaattctcattaccctaatcagaaaaataaacatgatgtcaattgattccctcatcaaattctagggaagttagttttttatttgtcctgaattattgcactgctttccaaataaattcattatattactttcataccataaagtaatacaaagtaaaagtcctatttagcataaaattgggtgggttctgaagtaaaagatagtggtgatgtatcttctttatgggggtggatttgcttagactatcttgtatatgcaccattaacattcagtaatgagatgctaggctttcaagattcctaaaatataagttttagcagatatttccttcatggattattgtaatgtagatatggttgcataaaaactttgtacttactcctgttcactaagatttaatattaatgtacattataatatttgattttcttgattgcaggatggtgtcatgcagactcatgatgaagaaactaagaagtttttcaaacattctactgttcattgtgtgctatctccacgctatgcaagcaataagctcagtattttcaagcaacaggcacggagttcttgcatttgagtttagaattgtgttggataaagatactagctatttcatgtcaccatcaatgtcattatttcttccctggaagacttgcatttagtagtagtcatagatataatgaggtcacgttgtgtactttagctataactaaaaacaatactaatttgattgaatcatctggtccaggttgtgggaaccctctttacgcatcaccagaaatgtgttcttgtagacagtctaggttctgggaataatcggaaaataacagctttcattggtggtttggatctatgtgatggtagatatgatacacctgagcatcggctttttcgtgatctagatacagtctttcataatgattttcataatcctacatttcaagtaagtgtttattgtaaacattgaagaattcacaagaatatagcatgccttctcttttattatactactagggaattttataaaacatatctttatgtgcatacagtggaataaagatactaataccaacttctggctttttctgtgttctgatttttgtcaacaataatgacaacaagaagcgagagccttgcaactggggtgggcttggtaaatagattaaagaatgatgctgtgctctaaacaaaaccaaatatttatttctgattttgcttgagttttcccaaatcttcttctttgtctgttaattttgataaacttcatttgctagtttatctgttggtcctcaatgttgccttatatggtgattttgccttatgagagtgttcatatgtcattataaaatcaattatgtcaatgtttatatacacatagtatatgctatggtttgatattcacggtttttatgggtgaaagtgagaaggaaaacaaatgcacacatcagcaccaaataaaggagaaaaaaataacataagggaatttgctgaaattgtgtgctatatgaaacagttacattcaaattcgtgtgcaccaaggcagccatggcatgacttacattgcaaaattgaaggtccagcagcatatgatatattgaccaattttgaacaaagatggaggaaggccaaaaaatggcgcgacttcaggctcaaaaaggtgacaaattggcatgatgatgctttgctaaggctagaccggatttcatggattgtcaaaccttctccttgttccaacggcgataaatctgttcatgtaaccgatgaaaatgatccagagagttggaatgtgcaggtatggaaatatgttgatagaatctgtgatgtacacgtgcccctgataaaatcaagtaaagattatgaactagaatttacatttaatacagatatttaggtccatagattcaggatccgtgaagggatttcctaaggatgttgacaaagctaaggctcaggtgagaacaaagttatacgtgatgcccctttatattatgagttcttgttattttcattaccttcacattggggtgtggtttcaagtcatattgagataaattagtccttaacttttaatattaatttgtttcagaatcttttttgtggaaaaaatttgaaagtagatcaaagcatccatactgcttatgtgagagcaataagatccgctgagcactttgtatatattgagaatcagtattttttgggctcctcctatcattggccttcatataaaaacaatgcaggtagataaacttaatttttctatatcttcaactttataaggcatttgctagtttttgcgttgttacaaaatcaaaattctggcgtttaggtaatgtacctatatatatgtctcagacccagaacatataattgtgtatctatgaaggaacaaccatgacaggttagtgggaggcacatgaatatacaacaaatcatttgtatattaatcctgttaagtgtcactatccaagataaagacttggcattagagggagttttggatgttaagagaggaagttgaaaattgaaagaaggatacacttgtttttttcagtaaaagtcaataaagtctatggttcatgtgcgagaaaaaaggaggagataaagacataagtctgcaaccttgcattcatttccatgttagatttcttatcttagagtttattaggtaaatatggtgtgcaccaaaaggtgtttgaagggcttattattgctttattttttctctttttgtaatattgttttcaaatgcctgcatacattatacaaattcatatttcttgctaacatttaagggaactatatcactctcctgatcctaagtttcagtagcatttgaatattaagtcaatttgtgagatacacattgctgtagtttttacaaatacactgcaagtgtaaggtttttatttcttatcttaacaggtgcaaaccacttggttcccatggagttggctttgaaaattgccggtaagattggtgcaaatgaacgtttttgtgtatatatagttataccaatgtggccagagggtgttccaacaagtgctgctgttcaagaaatattgttctggcaggtcagaccaatttctattctgtatattcccttgttaaaatttgcagatgaacattttcagtacttttcatgtgagtctgtctaaattaggaagtcagtttggtagaacgtgtttcttccacaaacttatatattattacctggtaatggattttttttgagggaaacgagtgcaatgtggttaatgataatccacaatcactgcaaacttgtccaatgcaacagacttattgtcattaaaattctactatgtaccaaaaaaaaaaacaacaaaaaaattccttcaaactgttctactgccatcctaaatcattttttcgttcaatttatatattggcatagacttatttttttctttcaccttcaattggttgaagaaaatgaactcacaaaccataaggggaaggatgaatctggggtttgatattcgcaatatttaatagatgtacataacataagtgacacaaatttatgaatatcgttgaggcctggaattttgttaacgagttgtcctgaattatgaggccagttttttatgtacttccttagaatgtaaatggatttatcgacttgcatgttagagtaaaaatagggatgttcattgtttcaatgtttgagactcaattgtctgtgatgtaggtcacattagctgaaccacaataatatatgtattcttttctttttatctctgcgtttttcgtttattctttggcataacaaatatgattgaagtgtacttatcacaacccatgtatttgaaatttggatgactatagggacagacaatgtctatgatgtaccagattgtagctgatgcccttgaaaaagcaggtctctctcatcagtatcatccacaagattatctcaatttttactgccttggaaagagagaaccacaatccacaaatatttcaccaacaccaaatccatctgaaaatcgcgctttggtatgctaaacttaactaccatttgtgtttccatatccaaattaggcattgcatgcagtttgaaatacttattgaacagcacttagaattcttgacgtgctcattatgaaaacacaagaatttaattcttgtcacaataatgccttcatcattcatcagaatagttatagcaacatttgaattctacaaattgataacaacttcgacaataggttgtgcctgctttaccttgtgtactaaggcttaggatcataatgcagaaaaaatcctgcaacaacttataatttattagttattacagcgtaagaaatttactaaaagggtacaactcaaaaatagacttaatgatctattaaatttaaaatttttcatttttatcttttatgtttttaaaatatatcattttatactttttcagtttttcatttaaaacatttaatccaattagtattttaaattttaaaataattaatttaatacagtaacaatttttaataattactatctttattttattttaaaaataaaaaaatcctaatctctgacctttttcctttcctaaacaccaacaaccatccttacccaccgtcgcgggcacgcaccacagccaccttcaccaattccgctcgcaaccctaaccccctatacccaccaacagctatgaacacaagaacaacaatgaacacaaaacagagtcacgaaggttgcgaaagtatgagcggttgaagttcaaatggcaatgtgcgtgggagaaaagcttagatcaaaaacaaagaaactcagatctgaacaaataaacttagatcctgcgcgtttggttgcgttgttgcttcatccggcagccgagggtgtgctgcagctcttcacggtcgcgctcgtccttggtgacgaagaagctgcggaggatggatcgaacgacgtgacaatcgtcgtaggtgaagcagacggcgcggagggggagtagtaggcgaaggcgatggcgcggtcgaagtccgtcggtggctagacaacggaggtggcgacgctggttcagattggaggatgatttggatgtaatggattgggatcgctttggacgcaccattgcctgtctcttctgtttataattttttggcttaatgttgcattatcaaaaatatatttattaattaaaaggatcgaacatgtaaataaaaattaaaagtatactaataatattttgaaatgaatgaaaaagatttgtattggtaattataggattaaaaaaagaaaaaagaaaatattgacagtatattgttgaaaaagtgtgttcattcacattatataatctgtaatttcattcaaccaatcccaaggattgagtatatccctaatttgtaattggattgtgtattagtgaatggagctatgagtatccctagggttttctcttgagctaattcaaactaatcaattgtaagcattacagtggtcatggtgtctcatgtctggctacatgtaagtattaaaatctccccatagtgcatgattgaataatgggtggtctgtcttacccattcattacccacctatgattggacaaggcactaaatagaaattacaacgtagttgaagtttgaattccaagcacctaatcttgatgaatccttaataagtcctggaaatcacatgtctgggaggttaagtgtatataaacatagcagtgaagaaaattgccatataataatgtgagattcttacttataaatggtttttatgttgccaaagcaagtttcatacatgtgtgatgagtaatgagcaaggtggctccttctcgtctagcaagaatgaagttggtggagattaaagtcccgaccttcatatctatatctgtgtgacttattagtataaaaattaacttaaacataatcaagattgcaagcttagattaagttaaatttataaaatgtttattggtcttctggatcaaattccttggatggaaaatacaacttcaaaaaggaagaaatagaagaaaatatttccttctgattttatcattttcaacatttcacacagatattccataagtttgtattagttttctcaatgaaatatatgcctagtgccaaatgatcatggattatctaccaaatgaatatttacttagttttgaataaattataaaagtgtcagcattatataatggccattacatatttacatttgagaagtaatcagttggtgcatgcagatccatttgcagactttttctatttatgtggtgatagtttatgatcttattgttattttttccctttctataatcaggtatcagttaaaaaattcagacgttttatgatttatgtccatgccaaaggaatggtagttgatgacgaatacgtaattattggatcagcaaatattaaccagagatccttagatggttcaagggacacagaaatagctatgggtgcctatcaaccaaaatatacatggacagaaaagaatgctcatccacgtggccaggtttgaagctccagctacgtttgttaatgagctagaatagttgtactagataggaattgggcatattaatctaagataaaagtatgtatgtatatatatatatatatatatatatatatatatatatatatatatatatatatagcacatattgcaaacacacgaaataattagacactaccaaaaaaaaagttaattaactaaatatttatgtgtgtgtgaaagtataatcttgaggttccaatctttgtatcagcccaaagtgttatagagccaacccaccattaaatagtttatatcttttggataaatcatgtatactattttatcagaataaatcattgtaagcataattgatgacaccctctcatactagtggactcgtagcataaactcagatctgtgaatagatcttggttatgtaatttcatcttttcttttctcagtaattggcaattccctcaaagattgtgttggtgtaggtgtatggatacagaatgtcactgtgggctgagcaccttggtagtcttgatcattgttttgctgaacctcataacctggaatgtgtcagacatgtcaataaaattgccaaacgaaactgggacatatatgtgtctgaggaagagaatcggatgaggggacacttgatgcaatatccagttaagatcagcagggatggaaaagtcagtgcacttgatgattatgaatcctttcctgatgttggtggcaaaattcttggatcaccaaattcacttccggatgcactaaccacctgattaaccaaaggaagtcttagaatattcgcctactgatatagctgctaagaattgcagctcaaaaaattggtaatgatggtaaagccaatttatagacttaaaattaccttttgtatgtaaatttctgtatttgatagtgagtgcatagatctcttttaatatatatatatatatgcgggtgtgggatgaactgggtactagactaatagtactcgttcctgcatccatcccattaaattttgctgtaaatacccagaccttgatccattcccattgagcgggtacccatagagtctgggtataattaatatctatccctaattgtcatataaaaatctttagactgacaatgtatcaaaattaagctctaaatgaaagtagtataatttaaatttgtagctagtatgaactagatgtatcgagtgcttttgctattcataatcgacttgtctgtacattaaggacatgtaagtttttgtctcacgcaactgattagaaatggattccaaccttcctgcacagttatatttaccattgcgggaataatagatacattatggtcagagaacaatcaagaggaattaagatggagcttggaaaatatagatgatgtggtcacattctgcatgagtgctctaatttcctaattgagtctgcttttgatgtacttggttggctggtgcattgagagtaacatttataatgtgttagcatatgcgcatatataatgccaagggtaagcagagtagtagattcagttgatgcatgaaatgtattttttggatcatggattttcctttcacgtgtggcaattaattttaatttagttgctactttggtggctttttaatatacgggatcaacatgagtaatggaaaaagagttgggaacttaagatattcttgctgcatacatgacatcattgattatgcataacatgcggttcttgtatttctgtcccctatactgtaacctagatatgatcttcattcaatttgaagaatttgaagctgttaagttaggatttaaatcttggtcgcgattcctatctaatgttcagaattcaatgttattttacatgaatgagaaatttttcaacatgtttcttttaaccaaggaattatcttataagaggagtgtgttgctaacatttttctcttaaataaatttgagttaattttttatatttggttcctttagtttggattatctatggttttgtttctttaaggtttttcaagtcaaataaagtttttcactttttaaaattaagcaaagttggtctgttcattttatttaaaacccttattatattttttatttaaaatatttaaatcaattaaattgtttgatttttcctaaattcaacaagttttacttaaaataaataactcaattctccttctttaatcctaattttacaataatttttttttcaagttttctcatgtttctactaaattttaattattaaatgtttaatcatttgtaaattcctagatagtaggtgttttaggtggaagtaaaatagaatgtatcaaaaaaaggtggaagaataatagataggtttaaatttacttaattttaaaaatagaacgtagttcaacaagagggaaatgtgaaatgcgtcaataaatgattaaatctttacacacaaactcaacaaaaggattttgcaagatttatttcaaatttcttgatttcttttattcttaatatgtatccaaaaaaatactatgacgttaataggcaaaagaacccaaataatacatttttaataaaaaattacgcatttggggtatttctgaaacatattacaaatctggggcagttgaacacgtccagcctggactggagtggtcacgcccagattaggcatgaccggtcacgcctaatctgggcgtgaccactccagcccaggctggacgtgttcagctgcctataaatgcctcccggaagttactttttaccatttgttatctttcaccttctctctaaagctttctctagtccatctctctaggatttgtgagagattttcctctgcagcgaagctctgtcagttttcgagtgatatacgtgtgtttaagctctgcgaacaagtaagtaaatttactattcatgcatattatttaaaatgttatattattaaataatagaattgttagggctatacgaaattgttagcaactgttaggtattattgtagttgtagaaaactattaagtatatttagtgttgttgatgatttaggcttagggtattgatgtgcatgatttagggtagagggtgtaggatctatggattagggatcaggggtaatggtttagggtttacaaaacctagggtttagttgtaatgggttagggttagggttgacaaaacctaggtttagtgtttagggtttacaggtaatggtgtagtgtttacaaatgttaggggttagggctgactgaatgtatggtttagggtttacgggtaatggtgtagtgtttacaaatgttaggggttaaggctgactgaatgtatggtttagggtttagaaaatgtattgtttagggtttagggttgggggtccaaggattagttgttaaattaaaatgatatgataatgttttgttagttcaattttagggttttggttttacaaagttaggggtttacggtttacaaaatgtagggtttagggttgacataattgttggtttagggttcacaagttttaggtttagggttgacataaatgggggttcagtttcacaaaatttagggtttagggttgacataattgttggtttagggttcacaagttttaggtttagggtttagggtttaggttatttagggttttgggtttacataaatgggggtttagggttcacaaaatttaggatttagtgttgacataattgttggtttagggttcacaagttttaggtttagggttttgggttttgggtgttgggttgatataagtgttggtttagtgttcacaaatcttagggttgaggttttacaaaattgggggtttagggttcacaaattttagggtttcgtgttgacataaatgggggtttagggttcacaaaatttagtgtttagggttgatataagtgttggtttaatgttcacaaatcttaggattgaggttctacaaaattgggggtttaaggttcacaaatttagtgtttatgttttacaaaattgggggtttatgttaatttaataattttaagctattaatttgtcaattattatattgtttcattaatattaacattgtcatagatggctgattcatctcctgattcgtcacggtccggttccgatgatgaggaccagggtatggatccgacgacgcatgttttgcccaccccatataagtggggggttctgcggaggcgtacccagcggacccacgtttcacaggccgtgtggaacgaggacagatgtcgggtgctaaagacacgacgtggcaaaattggaggggggccaaagtgtgacgatatacctgacatggttgggtggatgttaggacaggctgggttcctgcatgttgcacgcatgcaacatatccaggtatccaattatgaatttaagaattgtacatatgaattgactgatatgaatgttttcatttataagtataaatgcaaattgattaatttcgaacttgtgttcagatcgatgctgcactgatcagtgctttggtggagaggtggagaccagagacacatacattccatatgccgcaaggagagatgacgatcacgttggaggacgtggctgccatcttaggtttaagcagtcacggccatgtcgtgactggatccacgtcagacgagtgggacaccattatcgaggaggtgttcggtcatcgtcctctagatgctgagctaaaaggaggatttttgcgccttagttactttgataggatttatgaacattgggccgacgtggatgatgatgatgttgtccaggtgatgcggttttcgaaggcgcacattgcgcgtatcattggagcatggctaatatgcgaccgatccgggggaagcacaatcgcctgtcgctatatccctttgcttgcaggggacatgggggatataggtaggtatagctggggttcggcggttctagcacatttgttaagacaaatgtgtgagtgtacagatgtagacagaagtgacattggtgggtgtgtcactcttctgcagatatgggcatggatcagattcccactcattgctccagctattcctgatcatactcagccggcgtggcattacggccacaggtatgtgttgttattttgttttctttactgagtatgatatttattattaactgttactagttgtgtaatgtaacttattttgaaaataggtttaacgctttagcgaagttccaactacatgagcttcattggcatcgagagagattagactcccttactcgggatgaggtacataatgttctttgtattactttggttgcttagattggatcatttaataattgtgtgtttcattgttttgtttaggtggtttggcaaccatatgcaggctaccactttcttgatgcatctgacgatgacagactgttgtggatggctactagtccaattatatgcttccacacagttgaatattctcatcctgacagatgtatgcgacagtttgggagggatcagccaatcccccgaaggcccaggaagttgaaaggtgtgcatgatctctccctccgaggcaaacaacaagataattggttgcgtaagctcagacccttcatacagcgatgggagcagagggcccagcacatagagctgccccccttactgactggcttactctcaccaaaccatgagtacatggtttggtatagggagaatgggaagcgatacgtgacgaagatggctgcgaagttgggtcgtggtgtaagtgttgaaaaataaataataaaattggtttgatgatcatgctgttatgtagtgaactaattattttgttttctaatttgcagattgacgggctagagatgatatattattccagttccggggagtggccggagttcacgatgggttacttgcacgaggaggtgggccgcattatttccatgttccgagagagctgtcgattggaggagctaggcccagatgcaccagcatcgcagcttcagcgtcagccacaggtgtctttgaatgttccccgcgggagacaggaggggcatgggttagagcgtcggcggaaagtcatgcaccatgtccctgaacccattggagttcccaggcctcgcactgctggtgtttttaggcctcctgtgataggatccacatacagtagccagcctttgtattatgaaggcacccaccagggagacatgggccatcaagggttcactaccgaggattacgttccaccaccatctcacccccagccacaagatgtcttctgtgctactgctatggacatgacatcagaagcttgtgggaccagtactttcgaccgtagtccggagtggaccgatgctgattatgcgcgcctggctgatcagcttgattgtactccagcaagtcttgaggtctaccctccacttccagactatggcaccccacctccttcttatccccagccagcatcaccatatgagggagctccatacgcacctaccgatgttgtccctcctcaggctacctcttttgaggctggtccttcacagccccaccctagtgagtcaggcccgtctcaggtcaggcctcctctgcgccgtagcagacgcaggctgccggatcgtcaagctcgtcatcagccatggccacctccgtcttagttttgtattttgtttgtgtatatattagttgagtttgtaactgactttattttatatttatgtcatgtaatagactttattttgaagtgtacgtttgttgtgaatgaatgaatacaaaataggtcgttagtaaacacgataacatgtacgccgtaagtttacaacactaaataatgcggttttagggcaaatttgtaatacatgcaatcaaatacattaacatgtgacaaaagaaacatttctacaaaatcaggaaatagcatggcgatcgggacaagctctccgattatgtccgactagcttgcaaatggagcatcttgggcgtccttgagtagtttcaacttcgtccatctcgttacgtattctggtagactttggacgaccctttccacgtaacattagcctatcaggtatgatgattggaccttcgcttggtggaattgcacgttcattaccaattggttgccatggcaatgaataagcctgaaccaagttgcttacaaggaacacatcatccacaaactgaagaggattctgtcgaacatgtaaagcagcagctgtggcatgactacatgggtatttgaaggccttaaacttaccacactgacaataacgctcgactaagtttaccgaataagacctttcacaaccgtcttccacctcaaatgatgtttgatcaacattatacgtgcgtacatggtggcctgtagcaactgtctgattatgcctcatagcatcaaccacatttttgcaatgtcgtactgaaggatcaacttgtgaaatagccgttgtacccctcttcacaaaatattcaactaatctgctgtatgtgtgcttcaccagagctgtgataggcatgtttcttgctcccttaagcactcgattaactgattcagacaagtttgttgtcatatgaccaaatctcctcccttcaacgtcatatgcacgtgtccacttttccttggggatggcatcaatccatgcggcaacctcaggactgctatcacgaaatcgtgcaaagtctgcctcaaaatgaatcaaacaaggattgtaacctgcaaaacagtcatactattaacacttttctgttgaataatttatgtatttaatagattgaaaatacttgttaaccatacctaaattcataagggccttcttcaactgttgatttctgaacttttgattaaaattactggcaatatgacgaaggcaaaacacgtgatgagcaaaaggtggttgccaaccacgatgattcgccacagcagatagtatgctccgatgcctatctgaaatcagacatatgtctcgtctttgtgtgacgtggagacgaatgttagcaaggaaatattcccaggcttccaaagtctccccctcaactattgcaaatgccagtgggagacattcattattgccatcctgagttgtggcaatcaacattttacctgtatacttgccatacaaatgtgttccatcaatctgaatcatgggtttgcagaagttgaatgcttcacaacactgtctaaaagtccagaacatgcgatgaaacacacgctttgtccgtaccaggcgatgtgccacgaaataatcgttggtttggatatcataaaaagaacctggggaaaaacgaagcatgtggctacaccacctgggcaaaaatgcgtaagattcttcccaatccccataaatcattgccattgctttctgctttgcataccaggccttccgatatgaaactttgaatccaaatgaatggctgatcctctcccgaaccaatgaaattgacacagacgggtcctccttaatcattcctaacaaagaaatagcaacactcacatttacgttatcaaccttaaagaaccattattgaagacatatacacgaaattaaatggtgataaaaacatacctgttatatgtgaagcaataacatcagcatcaagctgtctatgaccctgtgtaatatggtcattcaagcaattgtggttgccaccccaccttgaaacaacccacttctcaccgtacgttggtttaatgaccctaaccctccatggacaaccatcattatgagcaatacacttgtagctaaacttgttaggcttgctctcaacaacatatgcctcttgatgctccttcatcaagttccgcttaattgcaatttgtgcgtcctttttagagggaaactcctgtttaacaaacaatggatcccctaattgccatggaccctgcactgaacctgaagccgaacccgaaccggaaccagaatcgcgaaaagagtcttcttcgcttggatgactccaatcaatatatgtgtaatgcggaattccatcccaaaaaggaatgacctcaccaccttcaaatataaatcaattcaataaccatatgatggaaaacaaaatacctatacacacatatgatagaacttcatcatttactacaatcatgtaacataccttcaacaggtgcttctgatcgcgtacgtccaacatccgcatgatcatggatttgagacgaccctacatcagcgtcttcttggaatccagtcgcatgcacaccagcagcatcatcattatctgacccactaccatcctcctgaataagacgatcttccattgcgaaaatctcatcatcgtcatcatcttcttcttcatccatgacccaagttgggtcatgtgagtcttcctcagacacgtgtaaaaatggagcaccatgtgatgatgcattacgcacacggtttgaaggaactctcctcactggtataacatcctctgctccagtataatccacgtacaactctataaaatctgggttagcctgattgaaatattcttccattaaaaattcaatgtcttcatcatccgcaagctgaaaacccatgtattgttcacgttgccatgatcttcctgtaagcatagtgatatgttggttgtccttcaaacctaatttttgtcgtatcttctgatgcaattcaatcagtgttgaccttctattgatacgtgtccgcctcttgtccccttcaaaaacaataccgcgtggcccttcaactttccttccattaaaaaacaagacaaaacaagcaaactcctgaccacctgaactcatctcttccagtaaacaaaagccaaacttttcgattgacctgcctttgttcacataaataaaaaaaatattgtgttataatacgttcttataattactaataaataaattaattcataaaacaacataaatacatattcatacacctaatttaacaaaccctaaaccctaaaccactaaccccttcatgctaaacccctaaaccattcatgctataaaccattaccctaaaccctacgtcatacctaaaccctaaattttgtaaaataaattacatttcaaacctaaaccctaaaccctaaaccccttaaaccaaaaccctaaattttgtaacataaatttcatttcaaacctaaaccctaaccatcaaccctaaaccctaactgttattcttcatccctaagccctaaccttaaccgaaactaaaccatacactgtaatacctaactgttttgatacaaacctacttaaacctaacagtcgctaacagacgctaacaatcgctaatagtcgctaacagtttaaattacaataatataatatattaaataacatgcatcaaataaattacttacctgttagtagagcttcaacactatttgaaaaccactaccaaacgcgcagagcttcgctgcagggataaaaccttaaactctaacacaaatacactacaggagcttttacaaataaactgaatcagcacaagtgatggaactgaagcgcggaaggctatttaaggcagatgaacacgtccagcatgggctggagtggtcacgcccagattaggcgtgaccagtcatgcctaatctgggcgtgaccactccagtccaggctggacgtgttcaactgccccagatttgtaatatgtttcagaaatgccccaaatgcgtaattttttattaaaaatgtattatttgggttcttttgccgacgttaatacgtaaggattcgtaccaaaagtttttctatcaagtagctatgttgatttttagttgatcattttatataacaacagtaacaataaaatgatgattgaggtatttaattaatactagaaggatatatattttaagttatttttttattttgaactctatataaatttcttaggacgttatattttaatactaaaactctgacattccttttggaactttgatccctttttaacccataattacaccacagttctacatcaccacgcatgtcatataatggtcaaatcgagtaattccttttcttgactaaaatcttaatcagattgtgaactaaaagcatattgcatatttgaaattactacatgtcaattcaactaaaaatgtgatcaagactttaaagaaagataaaagaagaaaatagaaacgtcggagattaattgtctaagattgattaaggagtttaacaacccattaaagtaagtgaaaactttgaaaatattaaagaaaacttgagaaattttcttaaggtagaaaaagttgttcaaaaataaatttttttgtgtcccgtaaatgtaaaaaacaatcctatttttctcgaagaaaaaaactatcctatttaaactaagaaaatttgtgtttttagttcttgtataatttttagtcaaaaaatatcttaatttctatgcttttaaactaatgaatttaattcttgaactcttagaaaatataactttactagttcttatttattaatttcattagtgagtatgaccaagataacatgacaaacaattattatttgtgacagtcataaaaatctaattctcctaaagaattattatttgtgaccgtcataaagatttaattctcctaaagaaaaataatactcataatatatttttaaattttttgttaaaaacatttttagtctttttattattgttatttttaaaatttatttttttattataaatttagtccatccaccattttaattgtataactttaattcatttattagtttaatatttaattaaaatacagacgtggcactaaaatactaacatagatgtagtattataatgattttttattgtaattattcttagttgcgaataattctcgacattttctgttttcaattatctaataaattatttaatagaaatagactctttttcatttatttcaaaatgtctagatttcttatatttctattcatttggttctcacactcaattatttatgaaaaatattccaattttttatgtaatgaacctattctctctttgctatatttttattttattttaaaatattaaaaataattaccaagaccaaaatattctgaggatagataataaaaaaaacaattattttgttttgtcatcatacaattatttttgtatcaaagataaatcattattaatattatttttaagataaatattataaaatttaataaataaatcatacatgataacttaataactttatgtttaaagtcacttttaattcatatgtttcataattattttatttttgtatattaagttttaaaagtttaattatgatcttttatttttttttaaatatatcattttgattctttttcaattttcccttaaaaaaattattattttgttaacttttaaatttgaaattgtttaatgtaattagtaaaaaataaaaataaaaaatgatatatttcaaaaatataaaagaataaaagaaaatatttaaaatttaatataacaaaataaaatatctgtaaaatataataaataaaaagtgatattaaacgataagttttttaagaaatttaatataaaaatggttgttttctaatgtataaaaaaatacaaataacgataatcgagtgatggagatgcagttactaataagtaataacaaacttttttatttccacacccattgactttggatttgctttggtcggtgggtcaataattaaagccgtcccaaacataaaaacaaatagggagtgtgcggcagaggaggagtgtcgtctcctttatggaggatcaaagcagagaaggtgaaggtgaaggagaagaagaacaacaacaatcttcactcttctattattattattattattattcaatttaatcatttaacaacaataataattttgtttaccaattattattctcaatcacaatgggaaagggtcccttcttccgccgctccacctctcgccgccgacccaagaagaacgccgccccgcctcctcctccgtctccgccgcagcctccctacgcggccggaatcgcaacctcacccgacgacaacaacaaccgtcctatcgccgccgccgccggcagctgcgccttgacgaaggcgaagaagaagaccggcggcgcccgcttgtggatgaggtttgaccgatcgggccggtcagaacttgttgagttggagaagaacgccatcatccgccacgcagcgattcccgctagagacttgagaatcttgggccccgtcttctcccactcctccaacatcctcggtattataattttcccctttatttttgttaaaactcaatccagagaactattcattcatttccttcatatctgctacctcttaaaaggtgtatttatacaaatattaataacaacctaaacagaataatttgtaacagaataacaactttcctctaatctaaacagaataacaactcacaaaataataggtaactgaataataacagtatttcaatcttcaacactctcactcgttcatggatatctatcatgtccaacttgcaatgatttcttcaaacactttttctgagacagcttttgttaatacatcagcaagttgctcctgggaccgaacatgggaaatctgaaaatcaccagccaagtctgagtctgtgtatccttcaatgcacgctatattattttaagacctttccatggagaacctttgagatatctcaaaatatgatacactgccttcatactctcttcatcggagagtgcatgaatctacttacaatgcttacagaatatgtgatatcaggtctagtatgtgataaataaattaattttcctaccaacctttggtatctgcttttatctacctcaacctgatccggataaatacccaaagaatgattcacttccatcgggtatcagcaggcttgcaagccatcaatccagtctcggacagaaaatctaaaatgtatttcctttgagacagaaatataccctgttcagatcttgcactttctatcccaagaaaatatttagaggacccagatccttcatttcaaattcagcagctaatttcttctcaagtaatttcattccttctatatcatcccctgttagcaccatatcatctacataaacaatgagtattgttaccttccctttgttatgctttatgaacatggtatgattcgagttgctttgcttttaaccaaacttcttcattgctaaagagagccttccaaaccatgccctgggtgattgtttaaggccatagagagccttttccagtttgcaaactacattctccgttgaaggagttagcttcactccaggtggaacctccatgtagactttctcttctaaatcaccattcaaaaaaccgttctttacatcaaactgtttcaatggccaatctctatttgcagcaatggatattaggattctgattgtattaagtttagccactggagcaaacgtgtcttgatagtctacttcatacctttgtgtgtatccctttgctacaagccttgctttgtatctatcaatactcccatctgcttttagcttcacggtgtatacccatttgcatccaattgtcttcttcccactcggtagagaagttaatctccaagttttattgtgctgaagtgcttccatctcaatgttcattgcttgcttccttctaggatcttccaaactgcacactcttaggaatatatacagtagataattgatcaactgttagagcatatgatccagatagcctatgagatgacgcataattactaataggatactttactttcactttagggtctggttcataaacagttttgggtttgcctttattcggtctctctgattttctgatttgaatactattaggagcagcacaaattgaatgatctgtactagggacaggaatcgactcagttctgggttcagaatgtatttcagaattatgtacaataggtgattcagttaggcatggtgtctcatgggataaaggatgacttgcatcgttgagatctgcttctggaggttcacaggttacttcaggtgaagagttttgaggagaattagtgtttgtgagctgatcatttgtggtggaaggtattggagtaggaactgtagaagtagatagccagaattcttcttctctattgttctggatctccccctgagaagaagaaactccccttgaataaagaacttcagtttccctaaaggatacttcaagggcaacatgcattttttgggttgtaggatcaaaacaacgatatcccttttgaaggtcagagtatctgacaaagatgcatttcttagcacaaggatcaagcttgtttcgtagagttttgggaacatggacataggcagtacaaccaaagactctaggttcaagattcattacatgagggatagaaaagaaagtttcaagtttttgctgtggagtaagaaaatttagagaactagagggagtacgatttattaaataagctgctgaaaggactgcctccccctagtaattggaaggcacattcatgtcaaataaagatgccatcgttacttctcacaagtgcctgtttttcctctcagctaacccattttgctgaggtgtgttgcatgaagtctgatgtttgatacctttagagtccaggaattcagaaaaaaaaaaaaaaaaattatattcaagtccattatctgattgaaggatttggattgaactttgaaattgggtttgaaccatattatgaaatttctgaaaaacagagaagacttcattttatgtttgagtaagaatatccattgtagaagtagaggaagcacgaggagtatgag

SEQ ID NO: 35 - DNA, 1000000 bp, Glycine tomentella
acatatatttttatcaaatcttaattattaatcaaaaatagaatatacttatattttttaattaatcattgttaatggtaatggtcttatcattttctatttctagtcaagttccatgcaaatttgatttttctttgattgaatgaactaagcctgtcctagaaaacgttcacgaataataataataataataataataataataataataacatgcacatcttttaaccaaaaaatctgtagtaatattgggggcatctcctgaatctgatagtgttcaaaattcaaagtttttaatccatgcatgtgaagtgaagttatgagttatccatctaagaataaataaattttataccaactgttatatgttcttacattgggaggttgtaaagatttctcttaacaacgtgacaaacttgtccccttatattattgtataccatgtgatgatgttaaatgaaatagtaaaacgatgtaatattttaatggttcaacagttttactgttataaaaaaaggggtactctttaaatttttagaacaacgagaattcaaaaaatatgcttgtataataaaaacatattaaaatataaataaaatgcttttaaaaaaagacacacgcgcacacacacgtctcaaattggctggtttgagttagcaatttaaaaaagaaaaccacaattttgaatgtaaatttataaagtgattatatattttaagggaattttaatgcgtgctgtaaagaaaaaatattttataaacacggaactgtaggcgaaaaggcacctaatttgtttttttttttttattcttattaaagtcttccaagtgcaattaaatattaaagaatactttgcaaaagcagcatttttaactgaaaaaaaaatgttcatccaaacgaaaaaaacactttttcagttaaaaatgctgaaagtcattctttatatatatatatatatatatatatatatatatatatatatatatatatatattccttaattaatactttttaatgcaaatcaataacccccagcttgttatatatgaggccagatgataggccctcgtggctctatctcgaggcatgagggaaaggaaaaaggaaaaagacaagagattctataatttggttagctagagaaaatattttataattttttttttatttcatgctattctttaatttcactcgcatataaagcaaataataaaaataatttttttattattttatattttcatttttcatttttttcttaaataaagctgatagtttcatacttattgattatttgaaacaataatcaaaacaaaatattgatattcgaatttgctaacactttgtgttttttaacttctacatctgcattaaactctttacctaaaaaataacaacaaagtttggcagtaaatataaatagacacttaataacgatttgagtattacgagagtttagaataattatcaatgaaaaggtagaaaaagatagatataataattatcaaagtctttggcacaactttgaactgaaattaaaatgttaagatcatacgtcatcaaataaaaaaatcaaagtagtttttctaagacttggacaaactttcctttttaaactaatttttagagttagttgagttaaactcaatttatttttaatgtatgcaatattacgatttatccaatgattatactataccactcacatatattcatgcaaattttacagttcagattttaaatcgttaatcttttttgtctgaattttcagtcgttaatctaagaattgaactaatgataattgttttagtttgaatttaccttcaactaaatcagctattcaaattaattaaatggggttaatttgaattattagatttattagcttgtattgattaaataaatagctctatactagattaggagaacaaaaatagtctgtataacttttatcaacctgtagttatttacatgctttttttaagtataattattatatagtgtgaatttaaaatttcaaccaatcactattagaataatttctaaaataattaatataaaagtaaacaaatttattctacataacaatttataattaaataataatataaaattattttacacggtcaataaataatttttttaattattaacaactctgatgataataaataatgataccagtgataatctctttacttttccttttttatataatattccatcttttttgcctccctcttttttacactgataactaaaccttagataattggattattaactgagtcctacttggtaaaatcaaatattaactaacatatatatccttgattttaatgaaactatatttcttttctttaagtaagatattggatttgagttataacaaagattaattatcaacaaaactaataaataaaaaatcatatattacatttacaaacaaaaaattaaatttataacgtcttcttgttctaagttttaattaaaccactaaaaaaacagtaaccatggaaatgatattttttttagtcaattggaataaattaccatttccatagttactaaaataaagagaaactcaaataactcatagagagggaaaccattataaggaatttttttaaagataactcatttaaagaagacaaatctatcttaaaatctcttcatattagatttttttaaaaaaaaaaatcagcttaatttcacgctttatatgtggagacaacgatcgtactgctacgtttggcaataaaatatacctaaataccacgcgcacagtaaattttatcagactgccacacagcataattcgcttgtcagtccagcgaactaagtgatgggcatgtggcagttagggggtaattcgctgaactggggagtccaacaaattaggtggacacgtgacagacaggtagtaattcgctgggcagcccagcgaattagatggacatgtgtcaaataggtagtaattcgctgggtaattattggggagcccagcgaattaggtggacacgtggcagataggtagtaattcgctagggagcccagcgaattacgtggcaatggaaaaaaaatgtcaaaaatttcgaacggtcataacttttgataagaatgtccgattgaggcgtatgatatgtcaaaacgctcgaaattcagagcggaagccctgggcaactatccaaaggggagttggtctgccattttttccaaaaaaacttctctaagtgcctcaaaattatgatttaagattacaatgtatcctttaaatggtctaacttttgatagaaaatgtccgattgaggtgtacgatatgtcaaaaagttcaaaattcagaggggaagccctggggttggtccgccattttttccaaaaaaacgcctctaagtgcctcaaaattaagatttaagattatgatgtgtcctttaaatggtctaacttttgatagaaatgtccgattgaggcgtacgatatgtcaaaatactcaaaattcagaggcgagcattttgacatatcgtacgcatcaatcggacatttctatcaaaagttagaccatttaaaggacacatcataatcttaaatcttaattttgaggcacttagaggcattttttggaaaaaaaatggtagaccaactcccttttgggtagttgcccaaggcttcccctctaaattttgagcgttttgacatatcctacacttaaatcggacattcttatcaaaagttataaccgttcgaagtttttgacatttttttccattgccacgtaattcgctgggttccccagcgaattactacctgtctgccacgtgtccacttaattcgctagacttcccagcgaattgctacctatctgacacgtgtctatcacctagttcgttggactgacaaacaaattatgccgtgtgacaatttggtaaaatttactgtgcgagtaacatttaggtatatttttttgccaaatgtgacagtacgattgtctcttatatgtgtgtggggtggggtggggtggggggttcaaagagtgatgataaattttaaaatattattaataataaaaactcataaaaaataaaggtgtaaataatttgaatatttgaataaagtttttagcattgttacaaaatatttatcaatgataatttcaaatgaaaaaaaatgattaatcatttttagtataattcttctcttccaatcacatttattgaattgaatcaagtttaaattattttataacttaattcaattaaatataattaaattgggttaattttactctcttttttctaagcaatcgaaaccatttcaactcaaccttaattgagttggttgggattgatcgaataaataacattctgaccatttaaatttaaacgaacccattctctatcactttaatttgaggtcggatattccattgtatcagttttagtagtaaaaaagaaaaagtttgttacgtactagaatttgtgttgttaatatcgttatcaatttaaacgaacattttgttgattatggccattggttggcatttaatagtatcggcgcattactaatatgttgttctatgaagaagaagagatggggataggggtccagtcaaatttcttgtttctttctcaaacattgtggaatgcaagctcttgaaatggacgcccaaagttacgctaattacaactttactaccactctcactcctccccaaccctacttcttctattttcctttttttctactctcaattaagtcaaatataggtaaaggctaccgctatttaggatattagttaaaaattaaaagaaaaattatttttattcaaatacatcaaataatattattcatattttttaaaatatttttataattttattttaaatattttataatttttaattaatgtcttgaaaacactgataagtaaaaaaaaattaaaaatatctcaatactagaaaaaaaaatgctggtatctttttctcttgtggcgcacgaagaacgtgtcaaacaggcacctctagtttttgtaatttttttcttttcgtgttgacttttttgccctcaacttgtggtcccacaccacggcgccgtgtaccgccgccgctccgccagcagcccctgccggaacactaccgagcactcaggcagctctccgaggtcggcgaagagcgactcgtcctcctccctcatcggaatcagcgccacgtcagcatggtacgtcgtggccataatcgggctttctagaaccgtggacgacgtcgcttccatctcccccagccaccccaattcctccgcggttgttaccatggactcgtccgcgaacttctcgtccggttcgaccggatccgaaaccggttcgggtcccggttcaggttttttggtgggcctggcgtggtttctagaaggtggccagggatggttgtggtcggaggagtaagtgacgactagcattgtggggtccacgccgctcctttccacctgtttccgtgccggacaccccttcgaactgctacacctgtagtaccctctgagtcataaacaacaaccactttcactaatcaaattaacgaaccagcaaatagtttcttgtcgtcggttatatatgttcacaaattaaccttaaaataaccaaacgtgttgttgcaatgcaatggaattatataattacctgggataaggggaacccttgatgggtttctggccatactttctccatgcccatgaatccgagggtggggcgttgctctctccttttagcctacacccttctgtctccttcattgggatttgcaccacccttttctgtattgccctcctgcttatttcaacataaccaattcccatcaatattaccctttcaaaattccatagctatatatacacactaactagcgaggtgttgttagaagtatagaattgctcatatcaagaattgtcattttacactagagaaatctaagagtttttgatccaatagttgaataagtttacaaactaataaaagaaagaagaagagagaatttctcaatatcaataccaaaatcttaaattttggagagtatatgcaatttctcatatcgttgttgttcctttgtgaattcgttcctagaattaatttccttatatgtaatgtttcgattttaaacggaaggtaattaggtatatatgtagatagcaagaaagactaaggagtactaaccttctctttgatgaagaagtgggggaggggactaagccatcgatgttgaacacagtggaagaaggaggggactcggcaatgttttcttgagctatatcagtgtcttgatcttgttcactggtatatgagttaacgttgtggttgttttttctgaacttgctatccatttcttgagatttggagctggtaactgtgttgagtgtgatattatatattgacccctggatcccacctagaaggtggcgatggtgatgactatggctaatgggaaaaaaaagggttagctagattaccagaatacaaggaaattaagacaattaagaaggaaaaggaaattaaagggggaaggaggagagagaaggtggggtgcccctttaaaaacgggggcttcgtgtgttgacagattggcttggtcttttgtttattaggggacgggagagcaaatacttcatcatatccgaacaaacgctaatttatatatgaatatgtcatttgaaagcaaccccatgatttctttagtcgttattttatgtgaaatttccttgaggataagcccattcattagtttaatggaactaagtctacccttttttgtcatatctggggcaccctttcaaacacaacttagtcgatctacttttgcttacatatatagtgtacgcagtattaactcctcaattttaattaattaactgggttgttatggatggaatggttcatcttcttcatattattatataatatataacgaagatgataattgaagcgttttatgtcgtgctagttaaaaacggatccagattttttctgtcggaagaacacacattcacgtacgcagtgagacgactaaaattgtttgatggaaatctaacaattcttaaattattttaataaatttcattttaaaaacacttttaaaatactaatcgtctgattaaatcagacggtctatattcatgaatgcctgaatacaagtaatccatttccgtcaaaaacagggtgaaaaaccaaaaaggtacaagttccatactccaagtgcgaaggctatacatcaaaaataagtttttttttttaaaaaaaaattaccaaaagaaatatttgttttaaaatattatatttaacaaaatgttaaaaatactggtttctcattggagattaaaatcatatatttttttatataatttttagggatttttttatcagcaatttttagggagttaaatataaagaattatttatataaagatttaaattaaaaaaagtattccatcgattcatctaaaataagtgtcatttaagattaattattttacaaaattaatcttattaaatagatgaaataaaataatattaatatttaaattcaaaaactaaaataacatatatattagatatgagtgaaaaagaataattaatattatattaaaaatccatgagacttttattttaagataattttttttccattcgtggcatttattttgggacgaatgtaatatcattgttttatgaataaaacttatacttaaactatatagaaattaataaaggtgccaaacttttcaccaaacataaaagggctggagaggaaagaggcagaggggaggaacaaaactggctttcttttccaatgaaatatcctactttgaaattgttctcgcgttaagcttcctttagccaaaccaacgagaaccttttctgtggtaaatgtaataataattaaattaattatattatgtattgcattatcattagttaaccagtacttggtcatgtaccatacatgtctaatttcttttaaagatagttttgaattcaaattttaagtatgaaaaaaaaaaaaaaaaactctcactaactctgtttggcacaacacagaaaaataagattagtgaaaataagaaagagaagaatggaaaagagataaataaataaaaagttgaattttgagttgaggaatacaggagtggaattgggaagagaaaatattaaaacttcttttcaccttgagaattatagggtgaaccagcttaataggtgattcattatgtatcattatttacgacctttggattaatttaagtaacaaaagttattatacacaatagtctagcatcgggaacgacgttgcaacctcaaatcttggttggaaccaccgcaagtcggaatcctcagttgttcacgaaatccaccagattgaaacgcacaacctactcgtagaactcctggcctctctcgcatccttcactttcggccccttcgtcatcctcacatagtcacattcacgaacaaacacagaaacctccccatctccctgcatccctccatggacacctcctccacttggccttcttcaacaatatcatatacctcttcggtcatttaatcataaacccaaacaacccatatttttttattaccatatttgaaacccaattgataaattttgctatcatttccatttcatgatggttgcttcaatcagaaattagaaaccggaaattcaaaagctgtgtaatctatttggtaaaagtttactactttacatcgatatgttccaacccactgtgctacacatgttcatgatttgtcttctcttttttctcttgctttgtgggattctgttcaggtgaaattatattatctatagtttttggagattcctgttcccctcagattttgtatgatgttttcaagtgaagcattctattttggatttttttgaacatttgaatgatttatttaacacactatgcatgcggtgttttctaggaggcaaaggcagtggactgcgacaatggcagaggcgcgcggtgcggctgatggtggaggaggagtttctgtttctaagaaatacacaacgataatggagtcttcagcggtggagagtttctaattagggagagaataattccgtgtgaaaggtgcatgctatattagtgaggattagatgaatctagccatgaataaaaattgtgcactttagaccacttataaaggtggtctacggtagcattgtccttggtttactatgaaaaaagaggagagtaatgagatcaaagataataagataatagctctaacaataaacaatcaagtatgcataccacactttagaattgattgtctaacctggaaaatcaattctcaataatgaaaaaattctctctaaaaacctcaattgattatgttggatgccaatgagcaaatcataaatagggaaaaataattgattaaaatatactcacaaatgactaaaggttataattttattataagactcaataaaacataaaaatattgatttctcacacatgagaattgattatgagcatacaacatatagataagttagagacgtatacataaaatcttaaagagaaaatagatcatgaaagaagaataaagatatcaaggacgattttttttcatatgtgtggacttttagatcagtgcgaataaacgaaaaagaataaggggatcaaggatgatttttttttttctgacatatgtgtggagttttacatcaatgcgaataaacgacaataaaaacaaaataaaatgttctttaacaattgacaaacaaaaatttgtttccaacttagtgttacaatgagaagatcattttggacactcgcttgataatctactatctctccttaagtctcacaattttcaccacattaattggtacattttttatatctattggtgtattttaatacagtctttctctccatcttgttaaaaaatgcataaagaaaaaattactatatataaagagctcattagctaaagctattatgaatgggttgtatataagattacatattattctctctggacttatatatttaaataaaaataattatttttatataaattaagaagattagttgaaataatttcattttataaatgttaagtaggaaataagattatttctaaaacatcctttattaaaatttgatatcaataataaaataaagtccttgaaaataaagttataattaaatgaaagatgtttaaggaatattaataatatcattaaatatgaatgaaattaattagatttaattatattaaagaattatgagaaaatacataaaagggatattcttagttcagatccacttttcagttttcatattgcaactatataactaattaatcatttgttaattagtaggatagggggaaaaggaagaaaaacaacaaaactgagctaaacaacggtcaccacccccaaaattgtttaatatacctttaattatttattgatgattatatgatcacatttattttgtatctaaattctagagaatgggtagctatcgaaaagtttaaataacattttcatttttgtcatgacgtatcatttaatattcagatcccattagttttgagttttgaccgagtcacttatggctggatctgtcgctctgtaatgtgaaagggaatggaagtacctattggccaatatgttacataaaaaatatcaaagaccagaaaacaaatcaattttctaaggtgcctaaaagcgtgaagcaatgcaacaactggttttatattattgatcatttattatctccagcaacccaaattttatattgtgaaactcgttcaatccatttttattttctacattttgtcagaaaaataataactatatcaatctacaaatgagtcgggggaaaaaataatgtatttgataggtttcttgttccccaaattttgacttcctttccttacggcattagtgatgcacattattctccaccataaatttctttcttattatatactaccttctctggatatcttatatattttcgcttttgtttattttacaaaagatcgtgagataatctaaatcttctttccaaaataatcgaaggcctacttatgactcataatatagacatttaatggagtagtttatatttatacaacaattatccttaagttcatgtgaatttctaacttttatttttgttgttgatgtgatcgtttagcattactactacagtatattattttgccctgtaaaatggctcatcatgatgtcaccgccaccttccaagaaacagaaatttctccatttattcgtttcatttttcaaaccccttaattaattatatgacagatttataagtttcatttctcacttgaataaatagtaaatctattgatagtataaaaacttgttacattatcatctgattgcacttgtaagtaagtttattgatttttatcataattaacttaaaaatataatcacacttatcataattagtagatgatgtaaaaagtttatgctaacatttcataaaattaaaatctctatatatgtatacaaaaaaatgtattaaattcaaaattttaactacattttttttattgaatttaaccctctctttgtacggggtaatcttttataaatatgtaaacaatgaaaattctaaaattaactggatataatttcccacttaattctaccgcatttttatgcatcaattacaacattttgattaacacctttatttcttcatttatcaaattaataatttaaatatggatgggtaagtatttgctacctttaaataaattactggctgaactagacgaggcatcaaaacatctcacttccacacgctgaacatttttcatttttgtccttttcctaagctaaactttgacaaaggttgcttgattgttttgcttccttgggaaaattatttcctttttttctttttattgaagccatgtagtataaattaattaatagtaaatgatatcctcaatcctccaagtgtgtattgttcgagttttcaaagaataatgccaatttgatgatccccatgctcattgactttgtaccaaaccaattgaatgtaactcacatgccctgtagaatcatgattcgtgtaacctgtaagtcgcattaaatttgaagatttttccaccggtattattaattcgtttgatttcagtttttccataaatacgataacgtgaacattactattttttttaatctaagctctcaaccctgtcaaagataattcaaataaaaaatttaaaattgaaatgttcttcaatgttaaattacaataattttttactcatttatcaataatactataagaaacatgtcttttaagtgacagaaatttaatgataatatattttatatgtttatcatcattaaattcttgtcccttaaaaatatatgttatatactcataaattagataggaatataaaatcaatttttcatgctattttttgttttaaattagtttcttaatttttaaaatttttaattttttaattatttaattaatgataaattagtcttttcataaaatttatcattttaaatttttgaatataattttatatctttttatttatttacttaatacatgaaatttattccattatattcaactacataaatattatgagaatcaactaatattcaaaatataaaaagtcataaatatattaaaaatcacgtgacaaattagtctcataaataataaaaaaatataatatttgatttttagattttcaattaatcataagatttaatttttatgtatttgtatttttcattttgtttatgtctgtttttgtccaaacattagttgattttcataataatttttatgtagataaatataatgaacaaatttcatgtattgattaataaaaaagtttaaaattgtgttcaaaaattaaaaactaacaattttttgaaatgattaacttattataaattaaataagtaagagaactatttcaaaaaaaattaacgttaaaggatcaatttagaactaaaaaaataaattaaagagtcatttgtatattttagcccataagaagttatatcttatattgtaaatttagtgatgataaatataaaatttataatataagtatatagttattatcagcagctgtaataataatgagtatatactcttcaaaaaataatgagtatataattttataatatcatccattcccgtcatcaacggatatatgcagtcgtaaaagatgtcttgctcagtgcgcgctctctctctctttttgttaagacttgagacaaataattatgggaaattaaaggcaaaattggaacaaaagacttatacaaaaagatgtcgaagcttggccgtcccaacatgtacatgcattatgcataggtagttaaataaaaaaagttggcacccctacaagacttatacctctcggcccaacccaaagtacaacaagagaacatacgaagtatgagcagtgctcacagaccttaacaaaataaataagaaataaagataacagtgtataggaaatggaaatgggcggagaagataataagtttaaattttcttctatttcacttttattccatttttcttttttatctctcttagcataaacattttccttgcagttaactttcccacggttgagtgagttcactatgcagttacgatacaaggattacaattttttctttttgattaactttgtaagggttgaataataagattaactgattaagtgtagagattgagcttcctttttaattccgactgcagctaatccacacccgtctataactgagaaatggctgaaagctacagtccatgaatgagggtagggatgctcatgattgattatcaactaacgataaccataactaataaataattagattataagaacatataatgagagatgtttggtggatttctaaaaataaaaaattatttcttagaaaaaatttgggtttttaataaaaaaaatcatttatcccatttcttattttttaaacatcactgatcaatgagattttttaaagttacaattttttgtattagagcaaaattttgtaaaaaatcttatgaatgacatgacactatagaaatcacaaaaaaaataagtaagagactctaaaaaatccatataactacttttcattgaagatgctctaagttctcattataattataatcataattaattttatatataatttattataatttggtataaccagttatgaatatataattagttaatttgagtaccccaacatgagtgtaacatgaggaataaaaggacaattataaatgtgtagaatgtatttggattagattcaattttctagtaatcactttcaattctaccttgtaagtcaaaataataaacgcagttacatttattaaaaagagaagatggttcatgttaaggatgtagagacttattttcaagagaaaaaacaaccaataaaagagggggaaaaaagggaaaagaaaactctcataagcacccaatagtcaccataaaattgattcttttgtcattgaatttggttaaaatttgagcaatagattcaagacaagttattcttgtttttcagaatttagactggggattgaggtaactatgtttgcagattcaagagcttgaattgcataataactgttttttgggtaatttctcatttgtaagcattgacatatatttagccgattataaacgtacaatttgtaaccctttttgagacttattggtatttttatttgaacattgtagaattatttttggtttgaatggcttttgatttttacctttgtattgttaatttttcttgtatatttgtgttcttttgtctctagctatttgtttgttgttgttatttccaaattcttataaattgggagggatttatttttctcttgcatattgtgctattgtatttatgctgttgtcttgttattttccctataaaacatctctcctacatcactccactctatttcgttcatcccaaaaatcaatttaactaaacactgttgtttctctaattccctcgcactttatatatgaaggaaaattttagtctaaagtctggtttcaaaggaattttaatgaaaaaaaaattgacacagaaagagctttatctcctctaaatggatctctactcacttcacctcagattaggcgagatacaaagcaaattctagatatttattgcttaagatcagcaaaaaaataaaaacacagaaattcacaacagaagttaacaaattgatatctaattctcctacaagttagtatatgaaaaatgtgaattatgaacacgaattcatgatccgtttgttaagaaatattttgtgtgcattggcaaaaggcacgataggtaaatcaataagtcaatctctcatactcaaccactctatttggttaggaatcaacattttaaagtaggaaaatgatcatgtgtttagatacggcggcgcataatcaattttcgaacaaaaaaatggtgtcaccgtgaattttgagaagcaactatgtgttgctgtggctccaccgtcgaattggccactatttctttttccactgtgctgccaccccaaacacactatataatcttgataatggaaagccttactcaacctttttcccctcccatgtcaccaatatgatttatataaaagatgaacttgacattggtattaactagtttgagatacacaagatgttgaacaaattgaagtacttaaaaaaagttacaaatcacagcctttgtcaaacttctgcgagtccttttcaccactctgctttccaatagcttttagaagcgcttcagtaatgtctcttacatccagcgtttggttctcagccacagcaatggcttccagacaaaaaccattttcacatgacactctcgcttgttgaacattcagacacatctcatcaaatgcctctaaaatagacaccagattgtcacctcgtttctcgcatgtgatcctcaccataaaagttcctgcccctacattctctattttcacatcctgtttcatttaattggaacattaaatatataaaaaatattcaatatcatgttagctatcataagcataaagatgttctgttaactactgatatgatcaaaataatgcaatataaataaggacaactcttactctattagttaacttttagaattgaattcatcaagctcaaactaaaattttaaaatagctcgaatccagttaactggtgatataatcaaaataatgatgcatataaatagagacaattttcaccttataagttaattattgaaattaaatcagattcaaacctaaattctaagatagctaatggtgggctttcacttgtatgtactattttcatcatatcactagtcaacctctaatctctaacatgttattcatgataggatattttcatttctatatataggccttgtttttaatgtgtgcctttgaggaaaggttaggagaataagcataccttgttctctttgacatggttcaataggctaatgcactctcttctggtggctaataggttttcatactgtcttttgacagtttccagtgcgagctttagcttgtataagcgtagaacggtactcttggcaagggagattctcttggccttcaaaacaaaacagaaacaattacttcattgcatgaaaaatagttattatcaatttgagaccatgggaaagaaattgaggttgcaatagacggtgttagatagcattacagagtttgagtaggtaaggactcgcacaatgtgaagttttctgcgcagtgaaatccttttctgcaccctgcaagccatctcctctgtatagcagtattttttatataactttatcttcctctctagtgaatgtgaatgttatattgtgatttgtgagtacttaactttggcagggtatttatagctggtgaatggagtgatgtgtcttggattcttgccattttcgaattcataaaaatagtccatttctactttgataagaacccaaattaaaatttggataaagactagctgacacctccacacctattacacgtagtgacatgggaaaaagaaagccactgacgagcctgtgaatgataaaaaagtggagagacaaagagacataagtcacataacataggtgtaaaaactaaattttgttttgagtaaaatcaattttaataaaattatttttaaattattaaacgtaattgaaatgcctacttaaattattttttataaatttatattggaatgtatagtttttattgaaaaatattaaaaaaagaagagccaagaacataaaaaattaaggttgataaaaattattcaaggtttataatgatttatagttttatacgtacacttctactctttgaaatgatgggattttcattagcacagaatcagtagtcataaatttctcatttacaagcaatgagtgataatctttaataaaagaaaatccataaaatataacacaagtgactaataccttaaattgagttgagtatgttaatagtatttttattctgttttaatttctttatttcgcttatctcattttattttatcatactcccgatcgagattaactgattattgaaagtatatgtttcattttattttgaaccaccaaattcatggcatagtaaaatagattttcatgatttaagtgacatcccttctcgagatatatgtacctgcattgtaaatgaaaaaagctaagccaagtaaacactactttatttctcatttctcaatgtgctagatacaaagcccttatcaccacacagcacagttggtgaaagggattggtacgaatcacagaaactgaacaagggggagcataaaaaggtggatgatatagttgtcatattcttgattaggagactgttaaaatttgcatgggaagggatgtgggaactgaaccaatggacaataagagaggatggtctttctcagtcagaaataatatcagtgactgccaatgaggcatacatgcatgcatatcactcacacccttcacgggcctctgtttcattttcatttgcctttgtctctctctactctacctcttccattgcaatttgcatcccttcccatgccaaaccttcactagctagtggccacagttgtatcacatgtactgacacaatttctgttttattctttatatcgttcccttttccgacttctgcacagccagattcgctggctagtaccccacttcaattaattcctaaagtataaattaggttcttcaacctaccaaataataataatattaaaactttatattctttgttttaatgtatcttttatatatcttcataatatcactataaaatatctattaattttattaatgactgatcatgtctttactgtttaatctcacattatatatgtaattttttacgtttagtaagaagttagtagttatgatcgactttcacttatatcgatttttaacttttgaatgaatttaacaagcacgcactttaaaatgaaaaaaatctacatacatgtttgtacttggttttattcaaatctttttttttttttttatagataacaatattctactctttcaagtttcaaatattaacttttaaactgaccttgtatttttctttatttgtctcctctcttttttattatgttatcattatatttattatttccctcttcctttattattattttaaggactaatgatatatggacatttattcggtacatacacctagttgatatatcctttaattttttttctctcatcatatcatattgtggtatattttatctacatttttctgtttcattcctttatatttctgggtttagatttatatacaggtgtctatgaattatttttgcacttaaaaaaatgtgaaaagaaataatttatcacattcgcaaatgcatcctctatttttaattggtgcaaacttatctaagaaaatcatttaccaagtaggaacttagtaattaagtatttggcattataatttaattttttttattttaaattgaatttattaaatcaattagggttagctacttgttatatcacaattcacaacataaatgtcatgtagttgacatgattggtttgtgacagccagatcacaagtagtttgtaacaccaaaataattattgtggtgatttagatttataattaatttgtgggtatcctatatatataattaaggactcgcacggctataattatttaattttctgtaaccatgcctgtatgtagctaaactaaaccagagatagatcactgatcaatggataaaggaaggagtttaaggaattagtaattaattattaaatattatttaatagaccgacacatatataaaatgcaggatgtgtgcatgtgtgctatagctatataatattaatccaagttgaaggaaaccgtttggaataaaccatgggatcggctggtcattctctagagctagaaatgacaaacacatagcacataaccagcataaaaggcaatggaaagaacttgtccactactgaatcatctcattcttgcactagcaagcactagcactacaaggcaaaaagaaagtttggattttagtagttgcatgcctccttaaattgctcttattagccttgttttgttgtacgcactaattttctcttttttgaaggctgcgagctagtatgtgaaagaggactagctactttagtgtctcctcatatatcctctcatgtaccgatgacaaaaagttcatccttccattggtttcagttgtccatttgtgctcgacatgtctctctctgaatgggaaaaaggaagttagatttgtatttattcattggcttctagctaaaagctctatgcttttcatttgcttatatccctcatggaatctagactcacatgctcaaaataagggagcaatattttgtataccaccaaacctttccacgggctaacatgctcatgtctttggtttgtgcttcgagaggtaaggaaataaaagcacaaaaaaaaaaaaaaccggcaataatatagaagtaatgaaaacttagaatgctgatatatgaaatgactgatcagacttcagagagctggcgttagagtggtttgaatgatagaattaattggtaagatttatataaatattaggatttagtagtaaattgtgtaccccttaaaagatattcttttaggaattcgattatttcattgatttgaacgggtacacatttatatataacgggaagaaaagttaaactatttagcgttgaattcaccaacgatcataactaataactaataaccttattggcttgattacaataagaagtatgcaagtgtaaaatatacatcacaacataatatgtgatcctcttcatgctactgtttttgaatcttaccttgcgtcttctaaaaactctccaaaggagacaacaaacatgtttcacatgaataaccaacattttccataaaaaaatattaccaatctcccataaagaggtcatataacattcttcttacgaaacataatgtcctaaaatagtgattaatcgtccttttattgaaaaatcgatgttttgcatatattattataacattcaactttgttcatattaaatacatttttcgatcgtctagatagtgaatattgtgtatttgttaaatattgcacatatccttattgtaactatatatttacttactaattaattattgcagaatttagtatacttgcaaaaggtgtgataatgatgagaaaagagaaaacttccaagattttgataaatcgttatttgactatgtttgaatcccatttttttccctctttattctattttgactttattttgttataagaacttatagataagtgtgaacaattgagaatgaaagatgataaattgagaaaaaaattcaaaagaaatagttatgatcttctttaaagagcacgacccgtgttgtatctacatatcatgctattccagcatgattatgttgatttttcaagaaaatttctcattagcaacccacatttgagcacgacccatgttccagagcaaaaaatcagaatcaacttcacatatccaagaatgaccatactactaatagcatgacacatgatgtttcagaaccaaaaatcaaaatcaatgtcacacatttgaccacaaccatgttgtccttaggacaactcatgttgacttagcacgacccttgtcgacctcggcgctgttatttaattgtcaatagtataaatagaaaaaaagggagacatttttaggttatatttttattacttttaaacaacaaagattttctgaattctagagctgcaccaggaacaattagagttctaatctgtaagagttttcgatctcttttattcttaatgctattttgtttgatgtttggctatattgtgaacatgattggctaaacccctagagcttgaattatgatgtacttgtacccatgtactttgatttcatatttaattgagttctctaatgtaattcagttaatcgtattttttattgtttctcttttacattgaaattgatcactctaattcatagttaactacatgttagtgaccatttactcatgattaactgacttgtaaaatcataaggtttataaaacttacatgatcaaactggtggcatgaatatctttttttcaaatatttctatagttcatttctgatcataaattaaattccaaatgactaattgtgaattaatttagggggaagagtattttcaaatcttgaccataggttattgattaacttaaagtgataaatcattaacttagggttaattaaaattggaataaggaaaaaaaattagtacatgcaaattcataattcggacttatctttattcatacatttttcttaaaaactattgcttagcttgatttatatttctttgacacaattgatgaaacactttcaacacaagataaaacgcccaaaattattttgttcttgtaatttgaattatttaggaaaacaactagtctttagagtattatattcaaactttcgaatccacgataatattgcgtatgatatatttatccttatgcaacattattttacacataaggtttctatcttttcaatcgtgtcatttgggaaatagaaagtattgaagtgaacaaccaacattttctactccccaatttaagtttctcttcgaagaggtgtttaattatgcaagggtcctatatgttggtgtttaatttaggggtctctagttgcgaccacccaccttccttgggcaaaagagagttgagcttcttcatcttgtacttcaagacttcttacatctttatcattttcatgtccatcattgcatcatgtgagttttaccatttaaaccatccacacaactcaaatcctccgtaccaactggaatctttgtttgtgttcaccattatagatacgtcacttttgaaagtaaaagtcgtgaaggtaaatagtatagtcatggtctatatataaaagtgaagaaaagaataaagtaataaacatttgtggcaattttgattttgttgactatcagtaaacataaatccccataaatacttgctaaaacaatgtgttagagctatgttttagtcactctgggtatcaagtaggtaaaagaaaccttgccaaccataacgataaaaacccctcatgctccgtatgcctcttaatcttcatgaaatgttttttatccatggagtaaaatatgctcttctagccaaatatttgaaaaataatctaaacactacaattagttcttgttctatttcttttttcttagaataatttttacttcaattaagcaatcgtgtcaatacaaaattccacagtttgtttgttcccatatattctaatttatcaaattccataattaattctacttgcctttcgaatatctaatctattttaataaatatttatcctatgcaatactaaaatacgaatttaacctaaattaggaattaggaacaaacagaaaattctagcataaaatgaaatcttaagatttttttttgaataaaattagttactgaaactaaaagccaaaaggatgaaaaaaacttcactccccaaaactgaggcattcttgtgtaagttatttatagggcaagttaagtttctggttatcctaatcgcgaattaaaattttaattttccacttgcactctctaattgcggtctctaatctccattgctattttagtctgtttgtttgttgaccgaacacgttgggctcaaacacaggcccaaacttgttttttcttcataagattgaggttgagcttaataggcataaattatttttttaatgttaaaaagagaagcaaaattagaaaggaaaactcatgggctcatattggcccaatatcatgacaaaagtgtatgtattttccagggatcgtacttcctgcaattttgatttctgaaaagttcctttccgaaatgtaatttgcattccggaatgaaatagaggtacaaacaagagcctattttcaattaacaactgatgggcttacgtttgcccaaatttactttcgttggtgttatttacttgttaattaactatgcaacttttttgtggtgttatttacaaacaaaagaatcaataactaaagttaaataagaacaaaataaaaatgaaaatcaaataacaactcatttatcttttcccctccggactgcgttattatatatatatatatatgtcagattaaacaaaaagataaagcaagaaaggcaccaataagatggaatcgggacaaataaaccaactcaatgagccggatccatcaaagttgggagggcatgtggcagtggtagcagaaaacgtagcaaggaaaggggtccatcgtccgtatcccacactgtacaaaagtaaaaaatgtggttctcgtattaaaatgatgaaccttcttttatattttgactttaactatgtatgcattttttgttgttgaataaactatgtatgcatttaataatacagacctgcaaacaaagaaaccagctgatcgggattcagcacgtgcggatacacggaatcattaatataatatagattaaatagtcatttttatttctaatgtgtagagtgttgacaaatttgtcatcaaaatatgaaaattaaaatttttgtcttcaaaagttaaaaaagtgtaacaaattcatcaattcgttaacttttgtctattaccgtcattgaaagaacatacgccaaagatgaatttgtaagcactatacacattcaagaacgaatttgtcagttcaaaaatttaatatgcatcttctccctttttaatcattgcaagtataaaaatacaataaacacttaaaaaattaggaaaacaaatataagatagaacaaatataataataagttcaatattgattcataagtataatatgtctgttgttttgttgtaacaacattaggtagtgacaaaatcaaattaagtcttattttttttaaggattaacttaatgattttacatttttgtttgagtatcatattttggataaagtactgtcacattaaaatttttaaagcaaaaatatgagacaataccttatccaaaatatgagactcaagcaaattaaaatacataatcattaaattaagccttacaacaaaatgagactcaacttaattttgtcactatctaatattgtcataataaaaattttagagcaataaaaaaattataaatattaatcaatattatgcttattattatatttattctaacttttgtttgctttcatttttttagtatttattataatgttatgcttgaaatgattaaaaaaaaggagatgaagattgaattatattttgtgtaaaacgctcacaaattcatccttaaatgtgtaaagcacggacaaattcgtccttaaatatattatgtaaactctttcattaacagacaaaagctaacgaattgatgaatttattgtatttttttcttttaaagacaaaaatttaaatttctatctttcaaagataaatttgtcaatattttacatagttttcatatagtagagtacggctgtgtaaaataattaactagaggaaactaaaataatttaccataacctgtaatcattgttttcagaatgcaaatgataatgtttgttaaataaaaaataagttagagcatcacaattattacatgttatggggtagcctcctcccaaaacgggaattgcccggtaatgtagctgcctcgaaatgttaaaatgatgtatgatgataaaaaaaaaaaagatgatatatataaacatttttttttattttaaatgtttaatcaatatacttttatagtaaaataagtatttatcaactatttttctaaaaaagattaaaataaattaagtgtgttgatgaggtgtttgatatttaaaaatgtctaaatattattattctttcaccaagaaataggccttaatattgctatatccaatccatagagaaaaatgaaaaaatgatgtactaaaaagagataaagaaaaaaaaaatgagagatattaaatgctgatgtaaatgtaaaaaattatgagtgtgccctactctttcacaagtagacatgacattcaccacgcgcgctctctccctctcattaattttccacaataataaatacccacgattaggggttccatgcattcatcactcacattcaatctcacgtcaccctcacagtcatagcactcccgttttctctcccccgtgaatttaatcccaattcaattctcaacaaccctttctcaccagtaaccaagcgaggtctctcgctactcccatctttttctttcatttttcatggatattcaagaaatgaagaaggatatatgaccagtaaagtgcatgaacatccttcttcatctctttgattatccatgagaaattaaagaaattcttcgccttggcccagaggaggagcagcaaaaccataaacacctttataaagagatgaagaagattagagttgctataaaattggagttgaggaaatgtttatatatatatagtcccctgaagaagattagaaactatttatttacataactagattaggagctggatgatggagttcagttcgcaaactagatggtaacaaaggctacacaaattgtcattccattccactcttgtatcatcataacaaaaacaaaaattgttttattgcatattgactacgataactcgttgagttaatattaattgatccactacttgcaatgttatagtctttaatacaaaaacaaaaagtttcccatttccatttgcagggcttcctctctcatcctctctgaacgacgtttgatgaagttactctggctaggtaatagtaaatccttttagggttgttggcaatgggcatgcttttcaggcaggcctatatatcttctgagtttaacattttaaccgttattaatttcagggggatagttgcaagaaaatagtatatatatatatatatatatatatatatatatatatatatgtttgccatgaatgcaatttcaatatttcacctttaattttagttgtttttctctggccagtctttaggatttgcatttatttggtttgttaaggaagagtttgcacaataatgtgcaagagatgaaaggaaatgtggatgagtatttatgagagttttcaactatataagagatatcctatatatccatattaattaaaatgttatatcctatccatactacaaaatttaactatacgagcagttcccaagaaacaaaggaaagactattctagcaatttcaaagttcatcaaaacttcccacaatttcaatacaccggactctaacatattgtggtaattggcaacttctacaatcttttccacgaagaaagaaccagaaagttaacctggtccaagacctcacaaaataccttcataatggctcccctttagaatttgttttcatgtaatgtctattctgtttggaataatggtaatataattaaagtgtatgtatgatctctttcaacttccaagtaagtaaaacaaagggttgaaatgttgaatagtacgagaataaaaactttcccttctggtcaaagctgttcaacacctacactccattatcaattacctatatttccttcaacatactaaaatctaagggatctaattaaaactatagaaatagaggccatgtgagagatgcaactgaaactgcaattgtatgtactcttctaggtgaggctcaataaatactccctagcctccaccacccacctcctctcagtatgcaaattcgtatttcattcactgtccaaagaccatgtgattgatcgatcacgtgaagcttttgacataagtagtactagtaatcttttggtacgtaaacattagatgcttaaacaaggagcagtacgttgcttctgctcgtaataaattctgtgcgtaattgagttaactcatcttaaataattaaatacttaattctattaatttgtttgagagaattttggaaagtaagtttatttctccaacataacgtatttgttttttttttatcctgttgaaccaactgaatttgttccatggaaataagtctttttatactaaaagatatttatgtatctatgtataattttggatgtatgacttcacaatccaatgaaacatattccccattcgaaaacagtagccacttttactttccacatgcaagtttctagatgaatataatgatgtcactcctacaaattattatgcaaattgaacagcatgtagttccaaacaaattattttagatgctagcattaaagtccatattgttcacaattcaatgtgtgctaaggagaattaaaatgatatcaatatgtaaggattaactccggtaaaaaatatccgtggtttagataaaaaataaaatcacaactactgtctatcaataattaattgttgtgacaatttgactcccaatagtcgtggacaagtaaacatcttaaaccaacaaaaaaaaaaaaagctgaggaagaatattaattaactcaatctctttcatttgagtgtgccacttagttaactacaaaaaattgtaattaagaaactgagtgactaaacatgaagaatgaaattatcagataacagaaagagatctagcagacactcctagctgtgtatcatggtcatggggtttaaatttaattattgaaattatgaaaataattacccttatgatcatttggcaattataaaatcaaagagatcccatgaaatgaaagaagtcattaatattttcatgtcagttgtaaagtaatagtttctatagtctttttgtattttcttatttaaaaggatgcctctgatgctttttctctttccaatcttcctataaatttgttagaaaggcaaaagattgcaacaatggaatactaattttttaaactctgtttaagagctataaaaggaaagttctttataggtgctttgtttttcaaaataaattaatcaaagattctattttaatcccatataacaagtttaacaaccaaacatagaaagataaactgttgtgttggtgtaatgggaatatcatatttggaaaggggatttcgacttttgcagctttgaatggccaccaacgcataatataacctatatatgtaccacacacaaaaattggagaaacaaagttacattttcccttttcacttttgttgccggttagcacttcaatgtaaaaattaattcaccataaaggatgtggttcgcatacaaaagaataaaaccttataaaaggacacatgcaacgcaaaataaaggcatcgttccataggatatgccgatcctagcgagccataaataacgtttccaaaggcattcctctatgtgtgtgtgtggatcttcccagttgcagctgcattacagggcaagttctccattggcaggtagccactatgatatgcatctcatatatatttgcaactttcttagtgtgcaatctgccaaaggagatttgcccagcgattctcctgcaacatctgcttcatgaaaacagtattcgttagtttcttcaaccattcattagaaacatttcttgtactggttgaaatgttgcatgtagaaccattcatgcatatgccatatttcccttgttttgtattttggtaaaaaccatttttcccagcatctttttcggtgaagtcgatattatgattttataatttattttacattttggttagtatagaccagcaggagaataacccacaagccacaggattagtaaagtggtataggccccattgtatttaaacgtggaaaaacaatttattcagtgagaaaactaatatttgatttgttttgtgtataaaattcttttgaatcagcgattaactcataatgaaaacaggattagtttctaatttagtgaattggaagataaatgtaatctttcacataacacaaaaaaaagactagtaagtgcataatttatatataggagacctctaatggttagaatgctttttgtttataatttgtatgaatccatcttataacacattaattgcataagtttttacttttttgtcatttaagtaactttttttctccctttagtaatgtaattctaaaatatttaattaaaaagtttatgaattgaaccagacaaattatcttgcatctttgtatctctcctttgaaaactacgtttacactatcatattattcacatgatcatataaatagaaatatgatcatgtttttattcacatggtcactactatgtgcctcctctcattttattttttgtttcagttcgtcaatttttattgggacccaaaaatggcaagcaattttgatttatgacctgcctttcaaaaaaaaattgatttatgccttgaataaactcccattgcttacatgttgtaagtctcccacactgcaataggaagtgtgaccgtttcttattaataaaagtaagttaagtaacttctgaatattctggggttagagttgctctaaccatattgtttaagaacccctgtttaatttctaatttcttttaaacattatcaaacaatatttaaaaaattaattttcccttatatattaggaatgaacaaatgtcaggatgggatcgagaagatagttgccaaagctacttattattattttttgggtgtgtgtaatcaagatttaggtaaatatatggggtaagtcaaatcaatcttttgtaataaggaattcttagttaattagtatcttaatcagggctttaaagtactgcttagcttcatgcacttagtgagcataagttttgtaatataaaaattggttaaagtggctctctttctccaatacgaatataacaagcatacaatcaaatttttgagctgcttctagtttcaacataaacaacttttgggtcaattaatatataatagtgtttgctagtcaccgatatcaaatatcgcgtgtagaagccaaagagaatgtgctgtagtatcttctttcagcataatcgtgctattcttttttctacctataacagtaagtcttttctttccaacaaaattagattccttatgaatgcataaacacaaaatctgaaaacatatattcttatttatcactctccgttgaaaggtactatattctgacctaacaggttcatgttcatatataaaaggacgtatatatgaatatttttctgcgatacttggttggttctttgattattctattctatctgatgttcgccacatatcgttaaatacgttacagggttacacagcaagggaaatgtaagaccagatttgactcgatcggcttgtatatgtaagtaaacaagtgggcataattctataagttgggtccattaaaaatgcttccagtgtgcctaggtttttctttgcctccaagtttgttttggtggaaatagagaagaaggaaattcaaaaagaaaaatatatagaacgaaaatgtcaaatttttattgtttatttgagaggagaaataaaaaccaaagaaggatgcactcgaacaataataacggcgacactaatatttaccctatatatatatataatatatatatacacacacttttgcatagccaaattcttaatgtaacatgcaacatgtacatatattactttctaattaataactacatatatgtcgagttagataagattgtaagtttggaacgttgataatcataataaaaataaaaaatgagttcatgtcttgtacaatatataatatcagggtgtttctttgttttatcacttttaatttattcaaacaaaattagtaagaattttcttgtttgtgggtattaattaaatgcattatatttaatgatatgattcagttgacaatacatattaaatttgtagggaaaaatttaattcttttttttaaaaggtaaaaaaaatattattaattggcatttgattccaaaggtgtgtgtaaataacattttcaaaacacaattgtacatatgcaatgtgccccacccaatatatacttcaaaagaaataatatcactcataatccgttgagagtgaatgctaaaattgttccataacaatttttgcaaaacacatctttaaatagggatgagatacacttcaaatcaacaattagtctcataatcaattttaattaaggaccaaaacttataaagatattccagagtttcactaagaaggaaaaacggtaattacaatggttataaaaaaaattaaatgtatcctacaatagtatttaaaagacatatttgtaattaatatctaactttgcacttatgaaaaaagacaacgcaaattaatctcctaagaatattgattgtaaaattaatttaatagaaaattcttattgaaaaatatttatcatatcaaatatattaaaataattcaatatttttatttttaaacaattaaaattatttaatagaatatagtaaatactcgttaattaatatctttaaagcattcgttaatgtaaccatttaaagaatgaattcacaactatatgtaataaactactcaaaattcatagaatagtaacatgcatcacattacccaaaaaaaaaaaaaacaatgatcactagatcaaattaaaggttgcttaaaggtatatcatcgtgctcttattaagcaaacaatattgatatatatatatatatatatatatatatatatatattagaagactgcaaagattactccccacatcaatgtctctaacagcactaattccttacatacgtatatagttgtttagttgaataaatcatcaatgtttctttgtttgtttgagattctacacaacttacagacggtgttcagtttcactctggaaataaaattgccttatgttaaaagtgcaccatagaattaattaagcataattgaaacatttgtggtagaaaaaaaattcacacaagcaggatgttataaactatcaacacccttaatttaattggttccattgtgcaaaaaattgcttgatttttttttaatataaaacatattacaattaaaatatttgatcgttaattcatatcagtatatttatttatattaatctatttattggcatgaattcttgaagaatttttattatttttttaaaataaggctacacttaattaattagagaaatattaatataatgaaaaaaactaacctcattgttgaaaaggatatataaatttaaataataggtaacaaataggtcttatctcaacaaagggtatacaataaagagtctccatgtgtttctaattatcttatttaagtccttttctgagcttatatgtaaacaaattaagaaccaaaattctcatccttctctgtaccaatctttccaatcaaataatttatataaaaaaaaatctataagaatcaaactaaggataaaaaaattataacaatatattcacatatattgtttaaccaactatggttaataatgaaacaaaatttgttaaattctacatatagaaaagcaaattaagatattttttttcttcataatataataattgttaatcatctatatatttaccaacctgaattcgaaaaaaaaaaagaagataaattattgtgcaagctgatttaggactttcgtagctggaaagaagggtttcaactttttacagctagctagcttggatggttaccaacacataatgcaatcaatatgtaccatacaatcacaaacgttacagaaacctacttttatttcactttaagaagttggttcgctatggattaaataaccatacgaaaagcccagaataattccataggatatgctgactctagcaagccataaataacagtcccagaagccattccgcttcgtataccttcccagttgcagatgcattatagggcaagttctactttggcactttactatactatgctatattatatatgcaattatgcatgcatacttgcatagtgtgcaacctgccaaagaagatttgcccagcgattctcctgcgactctaatatcaattgtgtcttctctgagaataatttttgcttatatttttcagtgaagtttatgttaatttactcattacttaatttctgctttgacttgatgaaagtatgtggagcaggaatgatactattttcatcaagtggttaaaaaaatattttaatgatattttggtggtggcttttccaccaaaatgagatatcgaaacacattttgtttaataagatatttggtggaagtaatgtgtttactatctcattttgaagaaatgtgtttaatataatttgtacattacaatgaagagcatgcatgtgaaacttctctcctacgattaaattggtcaaatgcgaaaatttgtcgtctatggttgatttaataattagcttaatatttttaatttgtctcttttgtttcacatttttgctactacaaaccttttatttaaattatattcattgattcatctatgttaaaacttagtttaaaagcataagtgaaagttttgtgatcataaaaatttgtccaagagatttataataataataattgttggagtacaagtatgaggtgaaatttcatatgatataagaataagaaagttgaatattatataagtgaaaagaagacttgtaaacttgaattttaagatttttgttataaaatgtaatattagatttgtggttgctcatgtatcctaagtcattggattaaaaatttctataaattgatcatatatttatatacaaattattaatataaaattatttaatatcttatttatataaattaaaattaatgtaattaatatatttattacaaaaaatactacaatattaataatttaatttttattatttaatattaataatttaatttttattatttaattttgataaaatttgatacagtaataaaataagataaagttataatggattcaaaccatatataaagttattatcaaattgtaataattagtactaaaaaaagtgtgataattggtgtaagttactttgccaaatatttctttttgctgtcaacgaattcaatactataatttgaagtacaaaaagttcattgtttgtgctgaataagcatttatttgaactgctagctgtgtttttgttaattacttcaattcaaaattatctttaatatatatgtaaaagataaaagaaaatgaaagaaaaagaagaatgcttcaacaataaggaaatcctatgaaaggccacaatcacaagaatattatgaaggcattgtcccataggatatgccgattcttaccagtcgtaaaaaaacgttaattagcagtagaaattacacttccaggctgcagctgcattactgaggaaagcatagtaggatatggtttcttcaattacagtaaagctcttgtagacttgtacgtagttcaattaattcttaaagtacatgttatcattaagaaaagtttttctttttttaatcattaataatagtttttaataatttttgatttggtgcagaagtaagggaatgtcaattattagtgacgagaaatgaagaacataaccaatacagggaacaagggaataccggaccatatctgcttttgcgccatgacaatctcactcgaattaggaggacctacacatattagtacagtataccggggtgaaaatgaaatgaacgaacccattagtgattggttgcataacgaaaacgaactgtaatgcagacaaattttatttacaaggatttgaatcatgaagttgtcatcaggtgatagattttatctaactatacataactctcctagttggtcgtggattagtcacataattaacttcgtctacaaaaatacctaatcaaagacgacaaaaaggaagaaaaaaaaaagattaggataaattacagtatctttcctaataaatgtttttgcagtgttttattcttttaaaaaaataaaattatcttctcctaagtagttattggactagtttgtttaatcttattttttaaaataaaattaaataaatagtcttatgattttctaatgtatttatttaaattattttatttaaaataaacagtttttttttataaaaaaaatttatctactttttttaaaagattagttaaataaaaattgtatatttttaaaatgtaaactatatatatatatacacacataatgtattataaaaatctatatattataaacaatcttttctgtttttattaacataagctaattatttttaacataaacaatccttcctaatgggagtccaattacattaattgacatagtgcgtgatttattataatttctaatatatatctttaattcttattataaaaaaaatcctagaaatagttattgtagttaattagaaactcattcggttaactttgaggcgatgatcattacaagatgacttaatgattttgggtgtgaattttcacattcaattgatcctttaaaaacctataactaatactgtcttcatccccaatctttagttattttagtattttgtatttgtttcaaaactttaattattttaaaattccattatgtaactgacattttcttctagaataaattatactaattatctctgaaattacacaaaactcatattttgttaacatttacaaaaaatatttcttatttgtaatgtatttttcaaataattaaaggagttggtgtaggaattaaaaaacaggaagaatttatgtaattctataaaacttcaagattgattaatataatttactctttcctcttctaactatgcccttatatatggtggagcattaattaagattattttagtgaaatattaataacttttatttttacgagatactgtgatgaagcattaatattatgtcgtagtaaaatttgcattgaaaaaataagtcgttgaaaataatatagaaatttgaaaaataataaatgagggattttagatataaagttgtataaattaaatatatttttaatcatgtataaaaatcttaagcaactaaagattaaaaatgaagatagtaacaatattaatgtgttaattataagtatcactgagttttttttttttataaaaaaaaaaaaaaccctcggacaaaggcttattcatttcatgattgctcagatatataataattgcaatataagagaacacatttagtttttccacttcaatggattcattttttcgtatatgacatttacagatttggatcatcaaagcaggagcagtaccaaattaaagtgagcttcatgcaatttaggaatagagagcatacgtttcacatacaactcattaaaatctctttcattctttccaacataagctaagaatccaaatccatgctgcttctagtttcttcataaacaacttttatgttccattatttatttgatagcaccgatggctaaccttgtgcttgagaacttcgcctatagtatcttcttttctcgcagcagcataattcatcgcttattctctttctatttgctcttcttttcctttccatcaatattcagattccttaattctttaaaccaaaaataaatcaagttcctttttatgaatgtataagcagaaaatctaaaaccatatattctggttggtcaccctaagcttgaaacgtgaaaaggtacattgcttaagccggcctccaggagccaaagtgcttatgatggctttctctttctttttcaaaggaaaaaagaggtcaagattcttctttgattccttgtgatttgattaggtgctgcagctgcgagaaaaatgaaggtagcacacgttaaatgatatgtaatattaacttcatattaattattaaataatttaaattaaacataacttttacttactcagtaattactttagattttttcaagttcttccaatatgtttggtttaatttttaaaaaatattctggttaacaataataaataaatattaacattttaacatcctatacaaatataaattctccggcaagcatgtgttaaccttcagagatagaaaaaagagaaagcctttcgagtttggagaggtcgccaatgcaacatgtatgtaccatgccatcatgaatttaattttcgtagtcaatttatttacttctgtttttacttttaatatataaaattgtcaccttattttttatatattttctgttttaaaatatttatataggaaatacagaaaaaaatgatgggttttttttttccaatttctatacaaatatttgaaaataggaatcaaattaacatatatataagaggtacgtgacagttttgtcaattaaaagctaaaacaaaaaatgaaaatagaaataaaattgctagctctaaatttttttaacctattgattttccttttgtactgccaaaagggatatatggttcctagacaaaggaataaaacagtatgaaacacaaaatggaaggcattgttctataggatatacccgttctagcaagcgataaataatcttcccagtagccatccttaatgtgtgccatctttagtttactagttgttttgtgggtgcattacaggacaagttctctttggcaggcaccaacaagctatgcaatactataagtgtgtgcaacctgccaaaggagatttgcccagcaattctcctgcaactctttttcaattaattcatgtgcgggattcatctgattatccagtaaaacattcactgtagtggttgaaactagaaggtgatgcatgtgctacgttcattttttaggacttgcatgaggtcctcttttttttttttcttcccataattgctttttgcttatagtaaggtgaatagtcgtttagatttaaagtatgtgtactttacattaatatactgtttttaaatttacttcgtcactgtttaagctatcaaaagtgaacaagtatcttaaacgagaaaaaggtacttgcaccttttttttgtgttcgacaaggtttagactaatgcactagtttagtattaaatttgcatgcattactaggttttatgcattagacaattttttttaacaatgacaacagtaaatattaaatttatgaattcatgcatatcattctaattaaatccctataattaagccgatcttagtgtatcgtatctgctattaatattttttttattataaaatagattataatatctatatcaacagttcgttaaacaaaaactatactagtcaaagaaataatccaaatcagtgtatttttaatgcttcattgtcatcggtttcgattttaattatgtcattcaaatctcatttgatggataaccctatatccatgtactaatttctaataactccatctaattggggtatacatatttcatggattacaattagcttagagtagaggattatgcaagatttatgcatgttcttttgaattcataatgttgcaaatttcatatcaactaaagatatatctaaagaagagtatataaatagggggtaaaaatcatattacaagtcagttttgtaaaattcaatcatatgcacaaactcaaaattttaagatgatattaaagttgatcgtaggaattgttgttggaacatccacaaatattaagacttgcaaattaacttcatgcttaagatgttcaaaccttgatgtaaggtaatgttggagatctcacatcgactaaagatatatattttttctttagttagcatcatgttattttgtaagtgttggtatacatttttaattaactataatttggaccaaaaaaatagcacaaaattatttttgtctttatctaattggaaattttgactatttacttagatatgatcaaaatttaatcctccaaccttatattagtccaagtggaatggcttagacatcttaggcaatgtttcaaatttgagttttgtgagaaaaaatgtgattgaaaagaaagatccactaagatgtcttatcatgattttcaatgaaaattattcatcaacaaaattaattaatactttacacttataacatgataacaaaaaaatcaataacatctcactaaattcaaattcgatccaataataatatataaaataagattgaatcaatttaatttatttatataagatattaattttaacattatatataactgatcgaattataaaattaatgtaactttttttgttaccacattaattaatgccattaactctctgggtagaaccattttgattgatagttttcttcaaaatatgttgttgggtctaaattttaattaaaaatgaattcatcaaaattaactttagaaaaataatacttatattgataggacaggatggatcaaaatttttaatttaaaacacttttcatgttggatccggattctctggagtcggagaaaacatatattcacgcagtcagataataagaaccgtctgataaagatttaacggttcatattctcgactgtgacaggaatccaaatcctttcatgttgtagttggtcaacctctaaaacctagtagtattaatgataaaagtgcccgtaaaaattaaaggaaaactcaatcataagttgtacatttcaacttatattataatttagaacaaccaatgctgtctaattaagaaggcttgtagttgtgaagcaacgtatgatgctgagtggccgggcgattcttgtttggcagaaaatatcatatctcaagcaagagtgtggcagtaatctgccaaaattaaagtatatttgcactgttattaattgttctctacctgtgaagtataccaattaaccattttgattgtactggtatatgctacggattatccttcgggaactcctttgtgttgtgtctgctgttgctgtcatggtcccccttgctgtgataaagctcctcattcaacaaaccttaataaaaggtcgttacagttggaacttaatttgaagcattttatgatttttcattagttagtttggtatttttctttaaattaaacatgcacaactaaatgccagtctgactagaaaataatgcatcttccataattaattgcatcatttttgtatcacatattttggttccatgattaccactgaaggactacagtgtagtttgaaccactacaatatttttcttgaaggcatgcaggctggcccctggtctcatatattatatatcctatatatcaactgttgcgtagcggcaagtatattggcaaatacacctatagttacaaataataaagtgtaaatagagtatcgtctccacaataattgagacactaattttatcgcaacttgttatcttaaaattggaatgacaaataatatgtttttaaagagaatatgattgtattttggaattaagaaaatttaataattaaattaaaaattaataaaaattcaaaagcaatattaattaagagttatgcagtgatgaggaagaattgtggttagagcatatttacctttgatctctaccttctgtattgaaattagttactactttcaattattctaattgctcagatgatgtatttttaaataaattagttaaatcctaattccttagtaatttaaccctttaattcaattagaaatcctaatttcttagtaattccctattaagttaagcattaagctaatacatgtattgctctgtaatcatacatctctatccttaggtaatgtaaaaattgttattttaatgctttcagaaattagagctccaacattcctattataaaccctaaaccttagaagctcactagaatgatcaagtctaataaggaataatttattcaagaacaaaataaaataaaacaattatcacaatttatattaacacgaatccaattacagaggagttcacattggttttagctctaaccatagtaaagggaattagccagacatgctcataactaaccttaaacacatgaataacatgtacctaaacaaacaatctcaagacaataggagaaataattgcttccaatcttgattcaatcctttcctattagctttgattcttcctccaccttctctttgcatttctatgtgttgttttttgtcaaaaagtcactcctttgttttctgcacatccatatttatatttagggtaattaaactcctatgttgttctatttttatgacaaatctttcttggttatgcttcttttcttcttttcttgattcctattaaacaaaatatgtataaaataagtaatggaccaagaattgatgaaacttaaacttatcctaacttttattgataaattatgattgaattattgattattttaacctaaaattattatatgctagcagcatatcatcaaccctcattgatttattagataaacgaaatatattatataagactcgtttagataaatttttcataaacattattggagaggaggctaaaataaattaagaagataaaatgaatgatttaataagttaaaatcaacctacacaactcagttgtaagaaaaattaagtttttcgagaaacagatgtataaatttattttaacttgtaaaagtgtttcttacgagatttatcaaataaattgactcttattaattggtcaatttcatattatttgaagtcacaagttgaacaacctaagtaatgaattgattcttttagattcctctttctcaaattcattgtttttaaaggtctgcttgataaagttttcttttttcttttttctccactattttaccttaaacagtgcatatcattcgcgtatggatcacagaaaaggaattggcaacctacggtttacaaatttagcgtgttcctgggattcctttgctgatagtggaaaatgtcaccattcgaccacattatgatgttctagtatacaataattgtggaaaataaagtataaaggacttcttcagtcatgcaatattgtaaaatcccaaagaacaaggattttttttggatatactgaaatggcaacagcacctactaagttaaatcttgtgaactgtaatctttacaaccaaaagttctggagaatgattttcatggaaatcaagaataatttgtcaattatattaaagatttaaaaattcacatgttcatctgaccacaaaagaaggattaattgtcaacaaactgacacgacagaggagagaaagtaaggcatagcacaaacatatggatcttcctcctcagcaagcttattctctttttctttcacctttcacgattgatattctaaagtactgaaaagttaaatacctatattatatatgatacaattttctgctcttggtcagtttttaaagttttattctgctactagtgattggccctttaaagtgtgaggggctgcattaatggaagggcaagattaaatagtaatgcattagatcaatacaaactcgcaggtctgaagttatagttatttaaaaagttgtcatctatatgcatgatacctacagaaacaatgagatgaagtaaggcgtaaaaagttggatttaactcctctgaaataagaattttcagtttaaacaataaagtatagttatagccattgattagaacaccaactgttgagattgtgatcaaatacacatgcacatgtatgataaacaataaggctagtatctcaatagttgattttctaatcaatgactgatgactataatataactaattttaatcatctaaggtgtattccctcacttaccttctaaagttaacaagtattaagcataaaatcatataaagggagaagttcgtaattcataagagactaattaatctacattacttttctgattgtatcctagcctgaaagtacaagtttggtagatttctttccggaactgagttttccagaatccaactcttaatttcgcatgacaaaccaatgctcagccccaactctgtttattggatagaaatcataatgcatggatgcaatacttgcgacaatgtgctctggcaatgatcacactaatattatgaagacaaagtataagtgcacaccagtagtatggcttctttatcctttaccaacaagaaaattagtctctgcttattatcttcagaatgtctttcccaatgtactaatgcttttcttctatgattttcatgtgaggatgttcactatactagcaagttataagttcaagagatgcaacgcttcataccagatgatgaaagcctttttttagaaaataatagaagaaatttttttgaataataattaaataattccaaagataggagacagactttttctgtcttctactcataatttaacagaaacaaatgtaaaatatatgcaaaattttttacctcttaacaagttgcataaggtcgatcagaatttcttattagatagtcaaaaaattaaaaagcttgaatttcttttagtggttatatttaagacattgtgagttggcgggaagtgctgtttaactattgatgaatgctactataatggtctaatatctttaccatcaaataaataaggaaaaataatcattgaaaaaattattcatcgccttccatgttctcaagctcaaacttgcaaaattctagtttgtagttttgtactagcaaaacttctccttgagaagggaatatgaacttaggctccattaataatgttgagctagatggacctaaaagggataaatgagaaaaaaagacagtatagaagaaactaaaacgagttggcatgcagcaaacgccgtctaagtccaatcaatgcttgaaaagtgcttgtttggattacaagcaaaaatgaatttacacaccaggcacatgtttaattaaggcacacatactaatcactttcaaaggtgtaaaatcaattataccaaaaatctaaaacaaataggctcttagatgctgcttgggcatcatgtctgaatcagtctgatggattttctgcattatcaaaaagttttatcacaatgataccttcagatataatcgctcataaagttatactcgacatcagtctgtttattctttcaatatacatttgaattttagagtacgaaccttttagttttattatcataatgaataactaaacgttaaacaaacgaaaccctcatattggcagtgtgatttggggtgttattgtagtaaatgcaaaacatttgaacgtgaaataacacatggaatttatttaaactgaaatggtgacggatagattttgacatttgaagatttctcgagatgaataagaagtaagatatgtgcatcaaatatcaatgcagcaaacgaagttgctaactgaaacttctctttttgttaacttcacagtatagtgcttaagcatcttcatttgctccatgacactagatgaaactggaaatgctggcaattgtcttggaaaatctctgattgttggctatctttctatccttttgatctccatgtctcataaaagtgaaacttctccatgtccatctaccacatattgaaaggaaaaccgttagtaaacaggaaagaaattaattaaatacagtcatagaagaagatagaaaatagccaacacattgcatttagtcagaaactgttaaaaaatggcagggcaaatctcctttggcaaaccagaagcatgcatgttcaagccctctacttctctctgccaatggagatttgctctatcattcctcaacagcacttttatgtatcacagttccaacaccaaatttgtgtctgaggccatcatcataaaatggaaggctatttataggtagctatgagcacctaacttggatatgccactgataagcattaggagcagacagcatatgccggtacaattccattgtaaggttcttgttatttactggtccaaattctttcaccatcaatccctttcaaaaacaaggttttgtttatatcatgatttactatcagatgcttttcctatgtaggaattggtcataaacagtttatgtatatacatgcacgaaatgaactatcagtacttatgtatatgtagtttatgcatgcagaagtggacttccttttcatgccgattataagtccatattatgatgtgttaatcaatccaaaacaaaatttcaggtgaataaaattaaaggtgtaaagagtctagcagccacttactttggattatagactgttggataggacgataaagcttaatgagattactctggggattacaaggcattacaagtttttctaatctttgaccaagttgatgttcaaggccacacttcattactctggtatataaatcatttcttagaggtgtccacgtccactatgaagaattcaacgctgaattgctattttgctagttgaacctgtcttaagcatgactacacaatggaagagaatttgctttactattcacgaatttattgtaaaaatttaaatgaagatttgcttacataacttgattaatttctacctacttccagaggttctttgacattcgttcacttctcctatgaaattttatgtcagactgtcaccatagacagaagaaaagaaaagattctcaatttacaactggtatgagtatgtactatgtacataagaataaaccggtagcaaaaagataccaaaatatcttcattctcataataatttagctaaaaatatctctttgtttcgaagaccatcctgattaaacgaggaaagagagatagacaagtgagggaaaacaaaacaaatcctctagataaccttggtcattcaacatacaaattgcctcaggctgttgcactttcattgcttgaatcagggcaataaatcgctaagccagagcataatttaacacaagatcaactggttttctctaatagctcaaatttgcctagaaattttcatatgactacatgcatatgtacataggtacataagaagatccatatgcatacatacatgtgtatatttatgttatgtataattttattgagaaactgtttccaaatggaatttcaaagtgtcggctgcattggttactcagtatactacacaagccgtatgatatcagcaatcaataataaatttagtcacttgaatggaaagatcgcattgatttttgaaagcagatcacaatatcattagacttgttatttcagaatttggtaatgcatcgcttgtgagaaaaagaaggggggttgatttttcaaccatgacattgagaattggacatagttctggaataggtatttactaccagcatattcttaacttaaagtgaacagaaaacactagaaaaggaatagagaagaattatgcctttcagatggatggaattttcttcgtcacggactcccatttcattgcttgttctgtttgtgtagagacatgtttgttgattaaaaattaaatgcatggaattttagaagaaaaacctgtggtaccaatctcacagtaaaagtgcagtagctgtgagactaaaggcacaggatggaccactttcttttttgtaaccagttgttgagcagaggatgtgctgggaatatccttagtcttgtgcgatgcatgtcctagttttatcaccccctacactatatatagacatggataaccagaaattagttatcgaaaagcaaactcatgtgcagatgcattactgggcaatgacttctttggcagttgaattgaacattcagctgcttgacattcaggcaatgaagcgaaaaagctatgttcaccgccaaagaagatttgcccggcaattcatcctgcgcacatttatcactttcatatattgtctgtctatctatctatttatttatatatatatatatatatatatatatatatatatatattatgtacgtgcttattgcgtgctcagtgtgaagcatttgtttttttttttctttctatttggcaactttttttttttttggtctaggtgcttccactggaggcttgattgagtttggtaaaatcattaaggatggtataactctttttctaagtatttaacatgactacatactcatgacttcaaatctttggttaagttaaaataatttcatcaaaacaacccacgctagagtgaactcagatcctacacaggatcgacgagtttttaagttataatatttgcaccaaatctaatatttttaagagtaatgatccataaatatcttattattttcaatatcttattgttaactccttaacaggtatacaaatttgttaaagtaatattaaaatgataagacctcataaggactttggttgtactcagaatttgtatacattgagttttaagtggatgaatgactaaaactaaatatttttcaaagtgatagtgtagaaatataaacttccaccataataaaggatagaaaagcatagtatgatgtaagagacaagaaaacaaagacttagaggtgaaaattgatatttggtgcatattcttttagatgtgttgggtgtttggccaaccaaaattacttttgatgcaatattaaggatttttcaccttttaaaattatttcaattattatcttcatcaactaaactactgataattgctaagtatacataaagttacatatacattactttgcaattatctattttttcctcttttaatgctttttttggtgatttaaatgtaggaactagcttcttcttagcttctatccagtggatgctttaactagtggatttatgaagtattggttgtattttttttgtagaatttattgcaagggcatgaaagatggatttcatgtttcgagctgctcgcttagcgaggaacaggcgcgctcagtgcgagagcagtgactcactcagtgcgaccaggcttgcccagcgctaccagctcattcaacgcgtggtcactaatccaactggactatttgaggcacgctgagcgtgaaaaggacgcacttagcaagtaccacgacatagggcagcgtttaaggcaaaaataggagggaaagaagtattgtagagacccaaaaaggaaaaacacacacttagagaagcttggagctttgctaggtcaagacggagacatcattttgcaccattggagctacctctccatctctttcccttccatcccattatcttccattgccctaacctccattgttgtaagctcctcatggaaatgaggagctaaaacccccattgttgagagttcaccaatcgaacactttgatgtaaagttctaactatctatttaatattatttgcgcattattgttgtttctctgagctttattcatgcttgtggtttgatcacccatttgtatgcttgttttaggttttaacacgttgggaaatgattattgctttaagaactgagaaatgcttctaaataatatcatgtccagggatagaatggtcttgtttagcctatgttacattgtcattcctaatcttaatgcaaatcgtttaatataactcttgagggatcaagggtgaaattaagtagtttaggtctagcacttggggaatcaaggttagattatactagtggatgaaggtaatcgtatttaacgttgaatagagaaaaatcttttatatcgcatcaaagttagtttcggttaatgaactcttaacaccaatggcatcatatttccatcgttcactttccgagtgtttgtgtttctctccttgtatttattaagctttcaatttacatttaagtacagtttaatataatgcaactcattttacaaatcaattttattcattgatcacttgaaaacaaacgtgtattagtcttgagtataagcaaagtccctgtggaattcaacatctggacttaccggattttattacttgacaaatcggtgcgcttgttggccgtttagcaactactctaaccatgattcctcatgcaaaaaagcttaaaccatctaatttcacttataatcccttaagagctaaactaagtaatttgatttaagactaacgatgcaaataagactaaataacatcattctatccctagacatggattacatagaagctccttcaagttcttagagtaaaaatatttcccgatgattaaaatcctataacatacatgttaatgagtgatcaaaccataaacaagacaataaacttaaaaaggaaggaataatgttgaaataacattaaatgaatagtaaggatcattacatcaaagagtatttggtatccaagccctcaacaatggataatttagtctctcataatcatgagaggttcaaaaacaaaagataaaacaaacgaaatggaaaaaaaatggaagaagaactcccaagtgaatggtttgctctcgttttgcccttgccaaccaatcccctccaaaagcatagtgtcacccttttataatctttaaaactctgcacaatcatgttttttggaaatgactatgttcttagcatgcatgtgcgcaataagcccacatgcaaagtacatttgttttaagtgaccatgtgctaagcgtccaaacgtgcacttagcgcccatgctcaatatagctaacttctaatttgtcttcacacattgagcgtgcattgatgcactgctctaatttttcaacatctatctgacctttattgttgtgtcaaaactctataaaaaaatagaatcaaaacactttttctatttatacattcataatatgtccacgctcgaagataggcgccaagcaatcattgagaatggagggtaccaattggtgtagcaaagtgtataaattgttgtaaatttttatttgttttgaattcctaaaaataaaaaaatatattaagtaagtaattttataagtaaattaaattatatatatttgtttttcataattaagaaaggacattataatgctcagtttaatcattaaaatattcagtcatgcaaacaacaacttttatgaatgattgacaaatctttttatgtttttcatcagtaagtaaaatttacacacaaattttatatcaaataatgatacataattattcaaaattgtatatcttttattaaaaaaatatttgttatattttttattatatcatgaattctatcatatttattttatttttcttatttcattctctctaaatattaaataacatattggatactggatagcatgaaacatttgcctttcgcttctagctacaaagctatgtcttagtagagacaaattttttttaatgcaacagagacgcaagtagcacgtggacaattggccttcttaattattgatttcccattcaagttcaactttggatacttgaatccgaattccgagtaaccaatcacagtttattacaagaatattcttcataggaaattatatatgttgtcctagtccgtttgtttcatttcaatatttgtgataatatatcaaatatttattatttttttcccacaaatatatctaaattctaaataatattaataatatagactatagagagagggaaagaggatgcattaagtgagaactcttgaatatcatgagaaataaaaactataaatttgagtcatataaacacatgactacttaaataaatcatatacatttatcttttattttgataatttaaatatgatctaatagtttatatttataatttttatttgtcaaaataataataataataataataataataagagttctcagttgatatgttttgcatatatacaaaattaattaatgtaactattaaattgaatgtttttataaagtaaattaagtttaaaaagttcttataaataaaaggaagttgatattgcattgtactacgttattttagttgatattgtcatctgttagaatataattcaatgaataatcatgtgaaattcgatatacaatcatataaaatactttgtaattttcactaatcgtgaatagttgaattatgttttgttttggataaagattatatatgttcgttcaaataatgtatatcactttcattagtttttggttttaaccctttgacttgtaagaagaaattgattttgattaatttaaagttcaagtagagaagtgagtaaaatatgatcgaaaattatttttgttaagaatcaatcttgaatactgattgaacgatttaatcttaatttcagtattttaatcatttatatctaatcatttggttatatcaatttcattgttatgttataaatataaagtatttattgattttattaataataaacttattttatcactttcagagggatcccttactatgtacaatcagtttgacattgttgtgaaatgtatttattttcagattgtctcgacgttttaaaagaaattctgctgcctaatttttactatttagtatttactaaaggaccctttcgaacttagttttggaatacaataaatattttgaatttgactaccaataatgcgtgtctgaatgaatattttatttgtatagatgcacacgtgactgggcaaaaaatagtcaacacctgataaatattttatttattttcagattcacacagagttaacaagggagataaaaagagaaattgatccagttgttaacaaagactcatattttattaggagatgcatttgattttcaccttgttgttctggaaacatttatttaagattgaggtttgtccggttttaacaaatttctaaaattcaattcatttaaacttctttatatataataaagaaattaaaacataaatcagtactatcttatacaagtaggtacaccatacacgacatcagtattcccataccattacgtgttataaagcaatgcaggcgtgtagcgaattttttttaggaaaattcatatctttatattaattattccctgttctccccttgtatctaaaaataatatcgattattccctgattccccctttctctatatgacattgattttactaacagtccccaagtgtgctgttgttgttcacacgtgatctgagttaaagctataatataatttggttgatgcctaatttatcataatgtaaagcttttttatattgatctcgtgtaggttatgtatcaaaaagtaaaaaccacgtgtaccttaatttaattcaaattattaactactttgaagcgattcccgtgtgtggtccttctaaacctattaattatacaaaacattaattacactaaagaggaatgccagaggtgggaatagacattattacatataaaaactcattttcaaacatcagtctatcatcacaagagtcaaatgttttggcaacaaaggttaaaaactgtaataaaaaaataaagtatgagaaaaacaaacaagaaaaacactaaaacatgcaagagatcttaaattctagagttttatatttgaaaatcttaagaagcaaatgccaaccacagtgacatgcgcaattcaagtttgtgtaatttggaagcaaccaacaataattgctgtagttagagccattaattttacatcaaaacggtttggtgtaatcatcaaacaaacacgaagaaatgaaaaccagtaaaatgtcagaatccaagagataataagataaacattagtggttgataagtaacttgatgtcaaattgttaacaaaatcccctaccttatatctagctttatctagtagcatccataattcactattccacctcaatcaattaacccttccttttacctattcataaacccacctaattccaaacagtatttccctttcgacggagtcaataatcttcactcggcaaaatagaaaataatattcccacaaagttataccacacatgaattgaaaaagatgtttcaaaattacttaattcaaaacgtgtaaacaaataaacaattgggttagaattttgtaattatagggtaaaatgaagggcaatatggtcatgaaacatgcatatatattctagttatctacatggactaagtaattcacttccgctaacacgcaattcacaaaacacgggttttttcttttctgctgattttcctcttcggccgccatggaaccggaggctgtcttgaacctctttgattcttgctggtttgaggttaacattttgaagacaaattcaagtcctcacacatcaattataagttacacagaaagtttagattatgagataaaagaagaacaagaacaagaaccaaaactacccttgatccgaaccagtcacaccagatccatgagtgaccaattatccatgataacaacaagcttcaaccatgattctctgtcaccagactcagtgcttcttctccatccaaagctccaaaccattctctcaggaaaagaagccactgactcagaacctgatgaggtgttgtgtcctaagaagaacaaaaaaatctcaagcaatggaactaggaagagaagggagagcaagagtttgtcagaccttgaatttgaggagctaaaagggttcatggatctgggttttgttttctcagaggaggataaagactcaagcttggcttcaattattcctgggttgcaacggctagggaaaaaggaagaggaaaaagaagaaggtgatgattgtgatgagataagtgttccaaggccttacctttctgaagcatgggaggttcaggaatgtgataggagaaaaaaagagaaccctttggtgaattggaaaatgccggctatcaacaatgaaactgacatgaaagaaagtctcagatggtgggctcacactgttgcttccactgtcagatgatgatgcactttttcataatccaaaaattttcttctttttctttcgtttcatatatacattttccttgttctttttttaatttagaaatgtatttattcccttttctaaatttttttctggaatctggcattccactaaatttgttacatgtaattttagacaaaaagagaggaaatttcattatgcatttcagatttattggctgaatgtgtacttatgtaggtcctgggacaaattttgtgatggtgctcatggtaggtctgaatacttctgcttcttagatgttaggttgatggtgaacaaactttgttttttttttttttttgtcttgcttgtttggctaaggaatttacaatgaaattcataggtaattagataataaactcagaaaatatagttttacagaattagatgatgatttcagttcataagaacatactaataattggctgaaacataatggggaattaaagagactagcagcactttaaatatcagaagcatttaattgtttctcctccgttgcatttatctgtaaattctgtgaatatcgcaatttttgtgcagctgatactctcttgatccttttttccctcaagtcccaaccatagtaaaacctcatttcataagaaatcttaaagtgactttatttcattatttacatttacatactaattacatttgtttaatattcctaattttggtgtcattgagataagagatgtaatttttagtctatctatttttataaataaaaaattttaaaaaataaaaaattgaaaaatcgttatataataatccaaaaattaaaatagaaaaaaagaaaggcttgagatgatttttgaatcttttatacaagataatctaatattcttatgcatgaagataattaattcgttgtgataggattctattatgaatttttgatcacattttctataggactctcttatctcttctttctttgagctaggcttgtggaagaaggaatcaagaagaaaatatcagcaacaacttattagtggacagttaataatgttcatatttattcaatatgtgtttttacatttagtattaagtagaccctatataataactatcatagcggaagatataaggatgatttattagtgaagaaaaaggagatcatgaattcgaatctccttttataaaaaaaaaaatactaacaactaatatttgtttggtgaaaaagttttcacaaaaccagttgtactgtagagaacgtgcgtagaccgaatctaaagaataactaaaaaaaacattttaattttttatatatattacttttatcaactaaggcttttgtttctttttttcatgaatgaattggatgattcattctagcaaagtaggcaaagcatggacatcggaatcaatcttttgatccaacatcagaatcaatctaggctgtgatcaaacaaactttattgttaatattttacaaatatatatattatatatcacattaattttaagggtaaaatatatttttaagtctttttattttcaatcatacttgatcttaattcctatttattaaaaattatgattttgatctctgtattttttataattgatgaatttcttctcttatcctattttcctgagttcttgaaagactgatgaaattcatcaatttaaaaaaaaaatacgaaatccaaaattacatactagtaatcttaaaatataagaatctatatcaaatttgacaaaaaataattgagatacttaaaatatattttatcctaaatgtgatatagattaataaaatattaataattttaatataaaattaataagtattaaatttatgtgataaaaagttaatataataataaatatatttaataatatagaacgaatttaatatatgcatgtgtaatttcaaattctcacgtagccaatggcatgacatttatatgtgtggacctacgagtacgagagatgcacatggaaaatgttgagtgatcagtaaagatgcaaaatttgcgagtattattagctttgtgtggttttctctgttttccccccttataataacctgtcctctggtctactttatcatattctggtatgtctggtttattttcttatcacgtgcccttttttatatttaatcatagagaagagtgacatgtatctaacggtataaatctaacacgtgaaccctttcaaaaaaaaaaaaaaaaaaacaaatctaacacgtgaacatcccttgtcttttgttatttgttttttccaactacaatatctgaaaaccgtagctagaattatacaaatatagtatttatttataaaaaaagatatcctctttaaaatcgtagctagaattatgcaaataaaccgtagtaattatcttttatgcctctaaagatttcctctttaaaaccgagcgataaaggaaagctgaagataaatctctccaagtacatggggtagaacataagcataatttggttgtcttttaaaagaccgcgtactcacctttgtcagttacctatttaagttaaagtttctttaagccttcatttttaaattaaaattacagaaaacaatattaaactcctttaaatatgttttgaaattaaaatgcaaaaaaagtttaataaaaaaaggatgacaataattaaatatgcaaatcactacaactttttctgattttgcagatcgggactagcttagaaagagcctgacaatagatattttgacaaacaatgctaaatatctccattggaaagaagcctttttttgaagaagaagggtaaacaatgcctcaacctacagaattcatggatgtttcagactctaattttgtcagtaacaaagatcttgatgatgaagtctcaccgcatatgaaaaacattcaacaatgtttgaaattcttgtcttgaaccaccttgaacaagttaaagaagacaagagcaagtagacaatttccggccctcacaaaacaaacaaatgtcacataatagacaattcaatgtaagaataatgtcattcataggcaggaaaagactatggtcaatgttagaataaacagctgtcaattatgattagttggcttttctattttattgttgtaaaattaattttgtatcagccatataaataagattgtacactcattctgattaagcaaaaataaaaaaggtaggtagtttttcttcttctttactctgttaaatcatagagtttcatcttaacagacaacactccaaaaacaagtaatagtaaacttctatttgatcttatcaattaatctcccccttctacaaaagagatgctaaaacaaatagaaacctctactataccttgggttgacatcatgcatgcatgttgtccccataaactgccataatcagtgaacttatttgtggctaggactacaatatagctaagcaacaatatttggcggttaagagcagaaattgcagggtcaaaaatatgtgcagaagccagtacaatctcacacgtatcagaatcatcaccagcaattttggcatcatagttagcatatataggttcatctttcaactcacccagggcacttctgaactatccaaccaccccaccataaagaatgtttgcacattcatcaatggctggagaatattttttttgtcttcaccaatcccttaagaaagttctgcccttctattgctttgtccaaggacagcctttgaaaattcaacgatttttttttcaaacaggattcttggatctgctctgagaatgtttgtgcagttgatcatctggtcttgtttgatttcattgcaaatttggccaatcaggtcaggaccatcaccaagcagcccatgatcatgatggccataagctctagaatttgttggcgaggaagaccggcaaatggggatcaagcaagggatgagcaataaggaatatagtactgaataattcattttgtggagagttttagtcaagaacacattgtgtagtgttcttcacattacataattatatttcgggtttaaatactttttgaccttgataatttaacctttttatttaaatttttctcttgtaatttttttttttaatttttgatcacttatgtttattttttaatttttaaaacactttaaataacactttaaataataaaaatattatttaaagtgtgataaaaacaaaaaaaaacataatttataacaatgaaaataaaaaaatattaaattataaaaaacaaaaagatatttaagtcttatatttccaaccaaaattaaaagatatcatcattataaacatgtaaataaatattaaaaaaaatacaaatttgattctttagaaaataatatataattgaatcgtaacacttaatattaattatctgtaaaaaaatattaatgataatatttaatgcattataatatggaggtaattacataggcctgaggttccatgtaattacagttttggcactcctctttttttacccaacataaaacctcctaaaaatttgttgcctctcgtaacagcaactacccctcaccccaaaatgttcttgactccgttaatagatgcccaaacgtgactagcacatgaaatgaaagccaccatccaaaaatggctctgtgctttcttaaaccattggatttgcagttcacttaatgactattaacgaaaaatttagataataaatttcaaaaacaaatcaagataggcaatgaagaacatgaacaaaaaatttccgccaacattcgcttcccaatctaagctcaatgacaagttcaataccatacaaattcttcaaagcttgaaagagataaaaaaagaatgcttaatgtaaatttcttcagtcaaattacaagaacaaacgaagctaacgtgacagtagtttctccatgtactagatgattttatatatacctcatattccatagataaaccaataaaagaggacaaccgagtaggtacagcaacaacccagaaaaaaagttattcaagaatattaaaattgggaggacttcaaatttaagaacccattgaagaatttaatttttttttttttaaaaaaaaacagatcttgggcgtgttgggcgctgattttatgccattgaagttgagacaatcttcaattgagtggggtgtggcgtcagatctggattcatgttaccacgaagtgcttcttggcttcaccttcgttggttttcacgctacccttcaaatcgaacgctggaacctttgcgccgctaacctacttcatgtgagatcttcgtccaagcaaccaaatccctaaacaaagtcactctctcgcgattttcccccaagcaaccgttagttgccgtcaccctaacttcagattctaaaacgtaagaaacccttcccaaacaatgaacagtactcgcttaatgcaggggcaattaaggaatactatatttccaacttcttatttgttatttttttttaaacaactaacgaaaccaaaacgcagttagatcctaggcggctaaaagtaacgttgtaaaaaggagaggacggatagcgggtgtcattactcgaaaccgccatgagacaatgtaattaactctatattatgtttccaatattttcaagacccgaatgatatcccgtttagaaaaaaaaatacaaatttaattttttataaattattataaaatcaaatctttgtgaatacataatattaatgatattatatccacaaatttaataaagacatattgatgctatatataatttatacaattaacatataccacaaataaaacattggtaatatcatttaataaggatatgatcttaagatatgatactcggacaacacttattatggttagtttcacttactctttcttttatttattagttcctctgagtctgtataaaaataaaataaaataaatctaagactacatttgttatggaacgaagagggtattatttttctttttttctttttttttaactacgggggtattatatttcataaatatattaaataataatatttaatatttatatgaatactttattaataaagtgtgtgtgtgtaatatcaattgtatattatatttaataaataatagtatctaatatttatataaatattagactaataaagtgtgtgtaatattaatttaaatagtactaatgtatgatcatggatctaatacatttggaaagaagcattccaacggcatacttttaggcgtagctagaactagaacaatgctccatggatctatattcaataacatccatcatccatgccatgtatgatcacggatccaagagctcttggtaggcgcttgacaatgtcagaacatcaaaaacccattaaggtcaggacttctacacataacgatacagcactctgagcaaatcctacacatgaacttcataattgttacaactgcatcttctctttcaaatttccaagcgggccaaagcttttctcttgtacttcctccttgctacaattgcaattgccagtgttaaagttttgaccacatttcaggcacatgcctttgcacccaggaccacatactgaattcatggtaatctcaagatgcaccctgtcccttatgttctttgaaatgtcaatttgtctctgttctggaggaaaatatagttgatcatccatgtcaacaagtgcatcatcgtcatagtcatcctcaccactgtttccagaggttgtaagtttgtcttccccaaaaataacacccatatcaatagtctctggttcttcaatgggtttgtcagtgagtaaaagtgagaactcggagaatatgctctcagcagatggggcacaacaccttcaaaagaaaatcacattgaaacaagttattctatgttgtggaaataataaattatagaatatggcaggggcatacttcctataatttttttttttcacatggagtcaacaaataataaattcttttcaggcctgccttttggtttcttcaatataagtacttgactgaaactgctatatttgcactattggctacctcataaaaagatgaaacattaaaacaattatccaggaagatattcgataactcagtcaggtgaataagtatacaatggtacttgcgatgcttagcatccagatacctgaagggaattaacctgttagcagctattgtaaacttacaagatatcatgttatttcaactaccccaagaatcttccatgttataaagcctaaatcctaatggagcattggtgtgaaatttaataaattgagatgaataacgtaatacaattatgcaacaagcaattgttgttcaaaaaacaaaccgatcatagtagatcagttcataattaggtgacacaggtcaaccaaaagtgcaaggaatatcaacaactattataagtttactacttttggggtgcaggactaagcatataaatctagttacaccagatcctggaggcagatgtgccagaacttcattgtaaataatagtaaagttcaataaagagaatagaaggtagaataaaaagttctaagccaagttcaatcacaggaaggtggaagtgtaattttctgtggagttctaagccaagtgcagttataattcaatggagtgtaattttctgtgaaatcatttgtattaatcctaggaaggtggaagtgataaggaagttggagaccaatcattttcaggatttaaagcttccatgcttttgctaattatatctaaaaagtttgcagatgatgtacaatgtatggccatccgaattaaaataatgcagaaatgagcaagaacaatttagaacagagcattttgttgaagagtgagttgatgactgatatccacaccagcaaattgtgtaacatcaatttttatcaaagtgatttaaatctattagttcaatgaaacttccgcatctgcctctgtaaggtctatgcaccttcattccacctcagtccacacaaaaaaaataggggcaaattacactcacactccctgaaatttaacaaagtttcacttgataaccctccctttttttacactacacaaaccttccttaacttatataacaaacaacacaatacatccttcctgttaacacagtgtacagaccatccctcatttcttatgtagttatattagattaagggaggtcaaagtaatgtcaaaagaaaaggagagttattgggtataatttcattcatcatcatcaacatcaacagcacctttaacccaaattaattggggtcggtggattgggtataatttcattattttggtgaattgtaaattgtatcatgttttatgctgtgagaccctggtggaatagagcttacaggtcatttatttagctatgttcgcataattagttagtagggttagttagtcaaagaaatacaaaggggtaatgttagaaagaaggggaatgggcctgcaactgattaagcccattgaggatgggattatgttagcaaattagtagctcctataaataggaaaaggtgttgcaaagaagagtttgtcatttggtgaaatacaattgagactaggaagagacctgtctcttaaatatcaaaggcattctttgtagagatacactgaatcaacaaaggaattctgcttttcttccatttctgatctagttccgatcagaatgttggcactgcaatcgaaattggaagaaaaaaatatgttctcatatcatataaaccctcacgccttcaacagttcagcaatcatggaaattggatggtacataataaatactatggtacacaagcaaccagagagaataataaccaaattacaagttgataatcttgtgtaataatgcaagcaatttcacacttttaaattcttagaggttaaacttcatattgaataaaaaatgaaagatgttcatgccaccattgtaatagcaatttgttacttactttaagagaagctattaatgtggatagaaagaaacagtgtagtctatgctaatgttttatttttatagaggaacacctaccattcaatgtcactgctcacataaagtttatgctgttatcatcaaacttgtcttaaatcaagcataactagtagatatcaattaagaaaattgcatattctgaaacgtgtttcctgctagtagacagggttctgttcccattgctgcttataactaagcaggctcttccagctagaattcatgaataaatatttttctcatcattaaaaacctagtgagctatcttgagacacaacgaaatatacccattcctgttaagcaaagttcctatgtagttttgggcttaacaaatctaaagagaagggaagggagagtagaggaaaccaacaccatcctatcctaagactagtatcaggcatcaaggagttatctactcctagcttattatcattaatatggtatattagatggagtcacatgcaaaacaaatttgaaaataatgcataaatgagcatctagacaataattacagtaatgcaaaatatattccaccatagagattttagtttttaacttttgaggcctgaagtattaaaccatatcaaaataaatataaagcagagtaaaatcgagaaagaaaaatgcaaaactaagagatgataaagaaatttagaaaaagcacttaaaagtaggcaatgtaaattcatgaattgaaggcaatacctattgcaaagaagagtgatgacagtttttatgatcccatcaagcctcaattttttcttcttcctggtcacatctatagatatctgaacaggagtgccatttggaaagtccttcacggctttcgtaacacgtaatcccattgcagcagccctagtttttgagacatcacttgaaagctttgctagacctaacctctccaaggtagtgcagtactccagatgtaaaattgttgcatttcttttgtatataactgcaccttcccaaggagatcccatatcttcgacttcttcatcatcatcccaacccaaggattcatcattaattgactcaaaatcatgccccttagacctaactgcatacttatgaagaacatttagttcatttctcaagtgagtccttatatgcctcgttttacaactcaaaggcactttatgttgaaaaggggtgatggaataataagaggcaaatttttggtgggaactcaaattgctaatctcccgttgagaaaaatgcaagggggctgcacaggatgaggggattacaagtgacatttttaaggttccaatgatgatgggtagacctaaagcatcaaaatttaatttggaattctagttatggtacaaaaagcaatataatttttttctttctatggcaattatgaattgaaaaatgtgactaaatcagcagctatgactataaaagtatgcagtatggtcagacagtgtgaagcagttgacattgacaacaggcactggattctgaaaggaaggcgaaaacaattcagtatgaaaaatgctaatgaataaaggaaacagcatattcccagtgaaagccaatatttaattagaataatgcaacgcgtgattaaacagagatagagatggaaacaaaatgaaaatgaagttgggtagccaagtttgtattaaaagaaaataacggtagcaaaaaaaaaaaaaaaaaaaaggagcgagaggggacttacagtcttacagagagtgaaggagatgagaagaggatggagggaagtgtggcaaaaagagataagtcggcacacaagcagattcatttgtatagctcaggtcccagtttcagaggaggcgaataaaataaatcactaattcagtgatttatttattactattaaaaatattttaaaaaatttaaactaatgatcattttttttaatatttaaaatttatgtgacaagatttgtaatacttttactattaattaaaaaccactttaaaatgaggacaattcacgtatctatttttttatttttttaaatataattttgacctcctattttgtttaatttattaattttaccttttattttaaaataaagatattttatcttcttattcttttttaaattcacaatttttattccactatttcaaaatagagatttttcatcttatattttagaaaatttataatttttattcttatattttaaagaatccgtagttttagtataatcttcaattttgtcatccttttatttcttaaaattgtacttaattaaataattcattgatagtgccttgtatatgttatgtctaaagtttaattggaataaaataaaataaaaatgtaatcaaaatcaagaatttgatcaaaattgtaatttttaaaatataggagatcaaatgtctttattttgaaataggagacttaaattgtatttttttttaattatgggaaccaaatatgtttatttttaaataaaaggattaaatttgcaaattaaataaaataggagaaccaaaattaaatttaaacattcatttttctagtagaatatcaaatttggagggataggtcaaaataatccgctagtcagcaaaaaaaaaaaaaaaaatctttcttaattttcttactttcaaaatagtttcaaaaacttcaaaataactttgttttaatattttaaccaacaaatggattaatttgttcatttcttcctttcaaccaatgtagatttttttttcaatcaccataacattagtattgagtatcaactaattttgatgatgattaatgtatgctggaaaaatctaattaatcatctatttttaactatatttaatattttttcattcataagattcaaaactgaagcattaattaaggaagataaattttatatcactcgaactaacaacttattaatcaatcaatataaatttctaattaaatgataacgctaaactattttagattaaactaaatgactcagtttaagtgttgagtcatgtgttagaaaatttatcttatctcaaacccttacaaatacagtcaatatcattgtgatgaaatttttttattacatattatcactctagtgaaatcggtgttaagttagatgctgaattgtattttgtaagtattcatcccctaatggtgtttatagtcttggcaaagggttatactatcatttagtgacctcaatccatttgaagtgtacttcaatcaacacttttgctaagttcaatcaaaattagcagtcttatctcaaaatacatcattggcattgtatgtggaagtctagtaaatctaattcccaccttaatatagtaaacaccaaacatcaaatgacacaagcagatactatcataaatactcatttgagggaggtcaattcacctcacaatctccattcagcccttttccatctcaaccacttccatgttacgctagcttatgaagccatattgacaattgggaagagttcatacatcaattatgagcaaattgttgcatatttgtttttctagtatctttattttatctttatttgtatattttatcttcttaatattgcttattactttcaatctaccatcttttatttttacttttaaattaaatttcaatatttttttgaaaaataattaataaataaaataacttcatatccctatctaaattatttattgtaaatcttaaataaaatatcatgaattttaattatataaagaagtatttattctttgtatatagttaaaatactagtttaagacaaactaaaatactcaaacaataattaaaaaaaaaaaactcaaacaaaatataatatgatacgaagggaataatcactgtacaacaatgactcaataacatattcactctcccgaacctgtaagccaattgactaaaaccttgatatcataataactagaataaaatatatagagtaatacaaacataatactaaagttgagttacatgaggtgcgtttatatcaacactaatgtattcaatgcgtgattgggaacttgtgttgcacctcttttaaagaatttaccggaaaaaatggaagatttaggtcttgaaacacagcagaagcacacaggcatcgtatattcatatttaattgggctaagctcaatttcgataattatctgttttgatatggaaagtgcagatgctgttacaatggttcattgaacatgttaaagtaacgccccggtgcacactgtgttaccgctggtttcctaatgagactaaactgtccccgtgaattatacccaaattcagctcagactcgagggcattttggtactccgaagaaacacacagcgagagttttgttttgcccttctcatgcttttggcattttcgaatagcgtacgtccaaattgaaactctgcaaaagaatataaagttcccgcatttactacacaagcttcctcgtttgttgtataaactagttcacatgttacatggtcttggtcctgttcactgttcacatttctggtcatagaatcattcatggatgggtcacgggttgcacaaagcctagactctctctggttccacaccaacatcttgacctgcagagatgagcctgaagcctctttggttgatcaatctgcacctttaatccatgccaaagagtgtcccaacagagatttgcataaacccattaccccactgcaacatgaatctcagaatgtggagaatttgagtccaaggtgtcacaaatttgaagaagtgaaggccatggtaccaagtagggaaacaaagaagagagagacgagaaaaagaaggaagtggcacaaattggggctatatgaaccaatgtggttcatggaggggttgatttgaggtttgattttgatgtgtttgatgtggagtcatgggaatatcagattcagatgcttaacattcagcggcaaattaagatgcctccgtttgataatgatgtggcaatgaaacaacatctcaagtcatgggcttatgcagttgcctgcactgtcagataaaaactttgtaaggtgaaagctttagctagctatctagtttaacttgttcaccatatgcattgtgaaaaattctcacttggcctcggtgataacggttggttcctgggtgggtttgagagtctatgagggataacagataacggttacataattaatgtatttctctctgttccgtatctgtggtggtgcctcatctgtagtagtaaatgttttcttctgtgagatgcatgaatttcagctgtgtcattaatactatttgtgctgttcctgtttctgtaatataaagtactcatgtttttagattgtacaggttttttttttttttttttcttaacggctcttttcattttttaaccaaatcttgctggactcgagccagagtgattcacagctgtgtttttaaaagtaaaagctgtagcttcacacactggatgataagaaaccggctctgttgtctacgtactcttactagtccttggcaattaaatatgttattaatcgtttaatcctacatgagagactaacaaaaatggtttagacttaacgaaggtactaatatacagcaaatgtatctggtaagacaatttttttgcgggagagtaaaaaaataaatattgattattatatctcattataaattattaaaattaaaacatactcataactttaagaagttagattattttatttaactttacattaatgtcctgataatccaaaaatattatttgattaattggtaatccatctcgcatgtctaggaataacatttgaatgtttttctttatagaccaatgttaattattaattttttattagtagaaatttgaatcaacaatctcttctcctcgtttatccctttttattaaaccaaatttgtaactccgaatatatattatgatttcacaaaatttatgtaagtgttatcttagctcaaaacatgatactttcatagcagttggagattatctccaaatagttgaagcttttatagatagataatatatatggcaattcaagaggtaaatgaattgaagtatgatttttgtggaagacatcatgttaatggtgaatgtgaacctgagcaaaagaatcaagacagtgtgaagtatgtttagaacacacataattgaaaacacacactaaattacataacagaacacatatagaggtctaacacaacaatcacaaagagcatttgaacagattatgatgacaatgaaagtactatgtaacagagcatgaaagaacaaactaacaacaaaatgtgaaatagagaatacagtaacatataataataataataataataataataggagaataaactaaccacattatgtaaaatgaaagtcaatctagattgatttctcttttaatcgatgtagaaagtaatttttaaattaattctttattaatttatcaaaaatgttcatctcaataattcaaaaatatcattgtctcatattttatcaatttctagagaactaatgtagaatataaacatgaaaaacatcttttttatatactaataaccaatgtgatgagataattatgccaagacctgatccacttatcaacacaatgcttaagtgaggctcacatggggcaacactaccttaggtcaagggaacatctgagactttattctatgagtgaacctaaattacataatacttatatgctcaaacgcattaaaagaaaaatatgcagacagatagtagtgatatgcgttaatcttgaaaatttgaatcacacttactacatttaatctttaaacaatatactattaaatgcattactgattgagaaagagaaactatacaggtggataataattttatgaagtgcattgcaatggaggtgatatcacttaattggaaccacattctttgagaagccaaccaagtgctgacaaagaaggcttgggaggcctctcctattactgtttgtgtatataaaaaattttaaaaatattaataaaaatacatgaaaaatacgtggcaacatgaccattgagaagaagatggaagagagagaaattggagaaagagagagagtgaaaatgagagtgacaataatttggtgaacatttttagtcatttcttaccaaatctttactatggcatcaacttgtgtttaatgtgacaaacaatgttttttttttcttttttaaatttttttattaaaatgatgtggaatttttttttttaaatgttataaaaatgttttttcaaacacattgaacctaactttcaatagtttcatctctgtcttggtttccatcttcattcttcaatagttcgtgatgttacacatctattcttgtgtcttcttatgattttgtttatttactgaaattagttttcggatcgagatgagccccctttagagttcacatagaatcagtgtgcataagcaacaaagaaagagtgaagtttctttgttttttgattctcttttaatataaaaaaacttttgtgcttgttaaacatagtcaacatcatatgtgaggaaggactaaaaacatgtttttaataaagtataaggactaaattggatgataaaaaatttcaggaactaaaaacaagaaaagtgagaatatagaaactaaaaatatattttcccaaaaaataaaaactgaaaaaaaaaagtggaagtaaggacatttgtttcatagaatgatatgatattcttaggaatcatattttaaggataattaggaatattatttctagatatatttaaaaatatttttgattacatttcaataattttaggattattttttaaaattaaaagaaataaaaaaggtaaaaataaaaattacatgaaaagagaatttatttagtagacagataaagtgtaaaatgtaaatacaaggttacttataaaactaactgaaagttagaaagttaaaagttagtcatggttgaaaattaaaaaaaaaatagtttatttaattataagtgtttaataaaattaacttttaaaataacttaaaagtctaaaatgatagatcaatcataaaatcatgatttatttaaataaaatatctaggaagttagataaatataaaagataaaaattgaaaaaaatataaaaaattaaaaactaaaagatactaaaaactttacttcaagtaatatttaaaaacactaaaagatatatgttcaaataagttttttaactgataaaaaaaattagcttgaaataatttggtgaacattacttaaccacaacagccaaaataatctaactttttttttgggaaggccttgttcgtagcatttatatgtgtaaacaacactaacttattcattcattcttcccttatgatatatttctatttaggttagtttgagaatggcaatctcaatctggagaagcaggagtttcattgctgccgatactttttttcggcttccgctccaagtaatcatcactctctaggacgtgccatagctactacatctccttgtaagcaaggaaagataaacttttttggattggaacaacaacgccttcaagttccgataggtatgaggtggctgtcgctgttggggtggaagcgaaaccacatgaacaggaggagcggggattgtcgctagcggcggtgatgaaacgacgtacagcaaagccgttgaagcgggaactgtagttgaggcttttaaaagtgttgtattctagctgtaattgctgttgcacagtgaaataatgtttgttctttaattgttaattgctttatgcagagcggaattcgtgtcgacgctgcagcagtattggttgctgtggtttgatgtgaggatcagttccaggttgttgttgattgcccattgaccattgtaaggtatttggttgactcggtacgttgcttaatgtgtaggaaacattgaaaaggagactgatcgatcaagccaaggttccttctggatacagtcaaagaacatggcaaacaaagttcccaacttctgtagtggaggagtactaaagaaaagagctgaagatcttgatgaatttttaaacatggttaaaacttcagttcaaataagtgtttatcaatctttctttcccaatgttttgtttttccttagtgccatttgtacgctttctgcagattattagaagaggtgcaagtgtctctaattaatgaggaaattttggcctttgcttagttttttaatgataatataagcaagttgatctcttaacccggtttgacttcaatatgttgcttttctcagttgtgaggtggtatgatgatttctattgtcttggatccagtggtaaaaattctcttttttttaaggtataaagtttggaatattggaaatgaaaaaaaatgtaattagaaagagatatctcattaaagatgataagttaaatttttcaactaaaattaatcattattgaaactagccgataaatattttacatcaatattatgatgttctaaaaatatgatttgaatttttttattttattagtcaatattaattattaattttttgttagtgaagtatttgaattcatgatctctcctcctcttttctctctttaccatcaagtcagtcatataactacaaatgtaggtacatgtaaaaggaactccgacgaacaagtcaatggtgctctaaggtttttatgtgtgagatcaatgaaaatgtacctcaggattttccctctggatgaatatatatatctttgttgtcgagatagttatgcgatgttcggagccacgttggtgagttgctcctctatgcaacacggtcgagttcataggtgacagttgagactgccacgagctgagcatgtgggggccccacgagccgagtacgtgtcgagtttttcggactgtacggtacataagccctccaagctctgaattttgtatgaatgatagagttttgtgtgttgctttgaaatttctattgtgatagtattagataatgacaaaatcaagttaagtctcattttttgtaaggattaacttaatgactatgcatttttgtttaagtattatattgtggataagatattgttacattagaaattttagagtagcagacagattatgcttattaatcaatattatgcttattatttccaagcaatcatgttaacaatcatttttgtccctatgtgtcacgtaagttcttttattaacggtagcatacagaagttaacgagtgaatgaatttttcacattttttttcacttttgaggattaaaatttgaattttcatattttagaaacaaatttatcaacgttctacacatccagaaatgaaaatgactatttatccttaccaaatttgatcctttatgcatgtgcctatcaccttttttaaggaattgatatgtataatttgcatcatcaagcacataaatccaattgatacgaaattatctatattgataaataatcttgagttctaatcttaaaaatataattgatttaggtgttggatgattttattaaataacatgtcataaatactatgcaattgaaagttccatcctataatttatgttaataagtaactcaagtattgtgtagatattttttaaaactattaaaaaaattgaaattagtagagaaagtcaattatatttttctgaaaatatttttgctgtttttatttttttcactggttcattaatttcagtagtggaaattaaattaagtaattaattatttttaaatttagggagaaaaaagaatttaaaaaaattgaaaagagtaaatttcaaagcataaacatttcatatttgataaataaaatttcatagtaattaaagttgatatttaagaatctgacatcttaatgtaaaaataaattctaataaaaaatcttaagaaattttgaaacaaataataattcgagatttttcaaaaattcaaaagtaaattttaaatattaataaagactcttatcacaataaaaatgagaatataatgaaagatgtccctatattcgtgaattaacacttattacaaataatgaaatatatatatatatatgtatatgtatatataacttacatatagaatatatttatcaaaataatataatacgtgtcgtagaatatataataatttacttaattatcttactcattgctattaatttttttttgtaaattttaacaaaaataataataaaaatctgtaaaaaacagaaataataaaaataatttatacttttagtttaacgatttgattgatacaatatgttttaaattaaattattacatgacgtaataatgccaatttttcattttgtaaattggttgtatttgcacaaacgtatatgaacttgattcgtcaacactactaaatgtatgttttataattttaacaaaatttcatttaattcaaagcatatttcatatttaacttttcttataactatgtcattgatattattgactaatttctgccaaaaaaatctggttattcacttttaatcgagcctttcctcttactcatgcttagaaaccaatcaagtttcacttggacatttgttactatttaaaattcagtttgttactctgtttcaaggcttaataatattatttaagtcattagaatttttttaatgttaaattatgcatttacaaatataaaaattatttaaaaatttattacgtatgagcatcatcaattcatcatagagtcacataagttaacatttgaattgataaaattgactagttgtaaaaaaaaatattgttaaaattgtaaatttgtgaagacttatatatcctgtgttgatgtgtatgtattgcacttttggcatgctcaaaagatttagcaggggaagagttgcagattgggaaaacgttgttgcagtcaatgatggtcccaattttgaattgccacaacattttcatgtgtggtggtggttccaatcacatgccacgtatcatgatgcccttttcatttgaagatgtgtgtgaagatggtccaggtgctggtgcatatggacatcttgcctcttgatgcactcaaggccgaactatttgatgagtaaagagatttcatgaaattgaatttgaagtttccctcacatgcaataacattaataattactatttgttggagtgagctcacaacaacattgccaactcccaccaacttcaattgtaaattggtccaatgaaataatcgcatatgatatggtcctggcctacgacacagatttgtgatcaggttcatgaaattagcttgtttgcccctacaggtgcagccatttcttctacatgtatggccactttctggggtcactcagtccattattgatatgacatactcagatcatgccatcaactagcatcagaagtggcccagcaatgtggtggacatgcaatgcagttgagcaacaatgctgcgtgctttgagtttggctctattgggatcctctgctctaagtttcctctgaccttgtttgagtggtgtaaacgagtcaatcaaataaattttaattagtttcttttatcagcaaatattagtttgctagaatattaatctttgttaacagaggagatcaaacccaccatctatttccttttttcttctctcttaaacattcaactaatcttatatctttaaatctttaattagtctaattcttaatactattagtccaccagttgttcttttaaattgattttataatagacagtcctggtgtacttaattatttcatcaattttctttaacgagggaagtaaaatgttgagtttattcccttcctatgatatatatatatatatatatatatatatatatatatatatatgagattaaatccttttacaccggtgtaagaattgatagttttatactatttaataattttttattggataagtattttataaaatccaccgttagattgaaagcttatatcatgtaaatcacatgtctcaaatttcacaaaaattcgaaatcatttagaatgtaatcaaatagtctaattttcacatattttagaggtacatatactgttaattttttatatatatatatatatatatatcaattaggtttcaaatgatttcagatttttgtaaaatttgagacatgtgatttacatgatataagttttcaatctaacggtgaattttgtaaaatatttatccagtaaaaaattattaaatgatgtaaaactatcaattcttacaccggtgtaaaaagatctcatctatatatatatatattgtatatatgtaactatattttcatcattttgatctctgcgatgcatttgtaaattcatatgtaatttaattgtccaaatataccttttctggagagtaaagctcattcttgttcccagagtcttttttttttttttttttttccgttgcttatatgatttcattcggtccagcagaaagtatctaatttattttggcttaattgcaacatctatcgagatttgggagcctaattgattatttttaatcatttttttaatcaaatttatttcatccataatacttaaatttaatacctttttttttttaaggaatttgaatctagttttcaccaactcatgttgatgtaattgtacgattttcattccacctgaatcttttgaaaaatactacttcaaattgattttatgtaataattttcactgattttagttttttttttgccaaattttattgattctaaaatgagatgattttttttttacaattaatagattgattgatgtccaatcaaaccagccagtttaatccaaatttcaaaacattgatttatattgaaggcaaaatttcagtactgatatgcctttcttgaatttaatttaattaataataaaaaaattatatctacaacttaaaattatatatatatatatgttaaagataaatactataattagtctttaaaaaaaagatatttatagacaaatatatatatgaccctgtttaatatctatagcacaacttaaaaggttttgttaaacaaaaaaatgtgtaaaaaaatcaatgggtaacaaagtaaatagcaaaatacaaacattttcaaatagtaaaatagatatagatgattcgtcctgatcctgcatttgatatggtctaaattgaaagaccggaaagctttttttttggattataaattaataataataaaaaggctatacctataacttatagctataatatcttatgagcctatcgtatctaaattaaatctatctatagtctaaagtaattctttttagtaataaaatatgtgtgacaaaaatagtaagaaacaaagggacatataaaaagtgaactttcgaacaaaaaataattctaaaattatttgcacaggtttattaacatatatcgtataattaatacaaatgaaacgtatatttttaaaacattactttttaggctataattaataataaaaataatatatgtaattataatcacaatctattttcggcctacatatatagctgcaattaaagataaatcgagatcctgatcaatccatatgtaattgtcttacaattattcataatatactgggttcgatccttgtacaagatcattaaaataaaataaaaaactatgaagatatcaatggacaaataagttgtgaccctatttaatatatttataacagaaagtaataaattttattaaccaaaaaaatgtggaaaaaatcaatgggaaacaaagcaaacggtaacatgaaaacattctcaaatagtagtatatatatgtatgattcatcaaaaaaaaaaaaaaggagaagaaaaaaaaatggatgatatgccctgcatttgatatggtctaaataattgtaggaagttcagtactgagaaaaaaatttagattataataaggttatatctataacttatcgctataatcttttctgagcgcatcacatctaaagtaaatctatatctagactctaaagactaaagtaatgcttttaattaataaataaatgttccataaaaaagttaataaaacaaagtgacgaaaatgaataacaaacaaagggacaataaaaaaaatcattcgaagttcgaacaaaagaatatataacataatttgcacatgttaattaacatttaattattaatacaaataaaaatatatttttaaaacctattgttatacggtctattttcagcatacatttagatataactaaaaataagtaataaaatttttcttaattattagtaaaattagtcactactctacgttaatattaatattatgatgactaaaaaacttatgtatacattacaaagatatctataaacaaataaaatacgaccctatttaatatatttatagcacaagaaaatattaaccaaaaaaacgtggaaaaaatcaatgaagaacagagtaaatatagtaaaatgcaaacattctcaaatagtaagatagatatagatgatatgtcctgcatttgatatggtctaaataaggaatttcagtactgagatgcctagatgtctgctttaatagatgttccaaagcagaaattcctagttttacgcaaatttcatgtccgacaagtcatttagctcatgagaacctcctagcttgaaaatgatcacatgcaatttaaatcctcaaagttatttaacggatcaagcttcattcattcactggcattggtgagatacgataagatctggtaggaaatcggaaatagttgaagggtgggcattttgaaggacagtggccacataatcttcggctaatggacaacatattttgcatgttggattctagatatgtgatgagaatccaagttgcatcccatcatttaccttcaaaggaaagcacatgtacgttaaatgttttattctttttaaagtccagtgagtcactataaaagaagacaaaatatttgagtatcacatatttttctttttaatagttttttaaaatctactattactattttgaaggctataaattattgtatttgtaattacatgactttattagattccagtctttcatttatattaacattcaatcacaaatcacattcatttataataagtatgttaactttaaatataatcttaaaaatcatattaataataatttcttattaatagacagtgtaaaactttctaaactgataacaaatattaaacccttcattgtcgaaaggttgtcattattgttaggtggtaacatgttaagatcaaccgcaaccgagggatgccatcagaactcctagtgaagaaatcttgcaagagtcatcatggctataaacaatgatgaaggcatggttgcgattgtagtggaaggaggtgacgagcatggagtgggcattgaatacgtggtctcgttgaaggggccagaggtaatgtatgtacgtagttagattggatgttgaagcctaagaagcatggaggagggaaactctttaatatcttttgaaattacatatttttttaaaaaaatatatttgtgaactttaataagtatttgaattttatgttaattatttttataaaaatatttcctcatagagttttaataaaactaattattttttatacttgatactttttttaactcataataaattaacaaattttgtatttgatttttgataaatttttcattaatttgttattaatatttttcaaagatactaataataaataatttttttatcaaaaaataaatataaaatttactatttatggtagattaaaaaatgtcaagagcaagaaacgaattttttattttatgggaatcaaaaacaaaaaaataatttattaactcttttattttagaaaataaacacaaaatttgaataattatttgaggtgatagatatattttaactctttttttcttggatacatgatttgttctttgggttaggatagtttttcttctcttcacaaaatccttcatttaatagtggtagatgtaacttcttgcaacattaataaataagggcaaattgattatcccacacttctaacaacatttcaatatctgtttcccccctcttctaaaaatgaatgtggggacttccaattagtcaaagattcgatcagttccataatttgcaatgcactagagatttaaattgattttccatttaactctaatataaaaagttttgaggtatcaaaattgaatcctaattattttttgtaaagagaagaatttgaacgttgtaattggagttaaagttatctaataatggcttttcatattaaaatcaagtactgaaagccacccatgattcgcaccaccaacatgacatttgaatccgaatgtatgcgaactccaagttccagggcatatgctgatctacctcttttgcaaattaaagtttctggtggtttgcgtcactgtgatctcttctttgcgtgcttctttttcaccaagattttgaagtgactaaatagctacgagatgtgacattttattcaagttttcaatgtttttgatgtggaagatagataaaaagcattagatgccatgcttctgccacagttccatttaaaagatgcttgtcactcattgaaaaaaagttcaaatgccaaagggtacaagaacgtgaacaaaacatgaagaacattacctgtttcgggtctaaatgaattgttaatatgaaaccagtggcctaaattaattaaccaataatgtttacatcaggaccatgattcatgaaccatcctaaaatctttttaaacgattcccaaatagtgatctccttctgtagaacaggatcagatatcagtccaaagatcacatgtggaagagcatagtctacacaaacgttaaactaccatcaaaagggatagttgtttataaagtgtctgatttggaacagtaatgttgctttcttaccacttattctggaataatatatataaagccacaggtagccttctgttgtattgcaagcatttgaacattttctgaaaaatagaaagatagagggaggccccactcagcccagaaacaaaactgcattgctgaaatgaagaattgtgatgaatggaaacctttcctagtaatgatatcgatagatttttctttaaccatggtgaacattctgcttaagaaagtccttcaaaaaggaatgaaccatttggtttttatcacatatcgtctgtcagttgctactatatttttggtccccatcggctactttaaggaaaggtatataggcaccctcaattcctttatattttgtgtgaatcaagagtatttccaaccaattatgagagactataatctcttttagacattgttgaaaaaaaattctacattgtctatctcaattattttggtgatctttatatatatatatattacttaattgatgattttaagatgaaatttaacgtgatattaaaaactatagcctatttctccttcatgtatggcattttaccttttggattatttttttatattattgttagcatgcagataaccaagttgcaataatgaatgactatgaaatcacccacttgaacgtaattctctttagaatcaaggatatatgttaagctaataatcatatattgctatccaggatgagtgctcaaatgggctcattaatttatgccagaaggaaactttgaaagatcttaataactgtattttcttgcagaaatggaagaccacggctcacatttcaatttttatgctaccttttcttcagtgccattattgggttagtcatgaaataacgatctttctttatgtgtttccaattcctgatatagttctttatgcatggttaacatgcatgatagtagaaaaaacacgtaatattgaataattaatttctttgtagggcatccgtaacacaatacttcttccttctggggatccaatacacctcagctacctttgcttgtgcctttgttaatatggtcccggtgatcacattcattatggcattaccatttgggtatgaaaagaatatatatttacacaaaacttattttattcatattcttattcttatagcgactatcatcattcaaatggagaatatatataaatgcaccatatcctttccctttttcttttgattccactacagattagaaactgtgaacattaaatgcaaaggtgggaaagcgaagattcttggtacatttgtgtgcataggaggggcattgttgttgacactttacaaaggaaagcccttgtttgatggctctcactatcaatctgcagtagccatgagatctgcaatggaccaagcttcttctactactagaacaacacagaaatggactattggtgtaatagctttgattatgggaacccttttttggtctttttggtttattttacagtcaaagatagggaagagatatccttgccagtattctagcacagccatcatgaccttctttggagccatgcaagcagctattcttggtttctccactggcagcagcaacttgtcctcgtgggttctcaaggataagatacaaataatcaccgttctttattcagtaagtacactctttcaaattattttggcttataaaaaataattaggttgattttttttttataagaaaaacaaaaccatgttgtacgtattcagattttttttactaatatgttgtaaattgattattggttgatttttactagtcttctttctcaggttttcaccgttttaatttctttatttttttcattaggtaatttagttagaccatgaaccgttcacacatgtggtcgattttgaaaagtatgatattttattattgaataattccaaatcctctaatattctcttatttcttttatactaatatatcatgtattaaatacattttatattttcaagataatattttttattatatacttattttttaactaggagaaaaaaattatatttctcaacaacaacaaaaattgcaaaagaatttataaaaaaaatacaatattattgttcacaatttgtaaatagaatataattaagaatatatgttgaaagagtctaattcaattaattgagttggatatatgaattatgataaacgttctaatactattgttttcgacttctaccaataatatatataaaaaaaaagcatgttaacaaagtgaaatactattatatatgtttttaggggatagttgggtcaagtgtgtgctatgtgggcatgtcatggtgcgtaaagaagaggggtccggtctttaccgctgcattcagccctcttgttcagataatgtccggcatgattgatatccccttcttacacgagcagcttcatcttggaaggtgaattaattcttgtacctaggactatagcacattaattcttggaaaaaagaagtaaattaaaaaccaaagtttaatatatgcttgtgcttgttaattttatagtgtggtgggatccatgttggtgatgatcgggttgtacatgctactgtggggcaaaagcaaagatatgatgcagaatattggcgctactaagttcgctcaagaagttgaagaaaccaaagaacaagagccgcaagtataacgtagtgttgctgtctctttgtacggtgtcactcaaatccagtggcactaacttatgtttatcagtttaatatatatatatatatatatatatatatatatatatatatatatatgtgtgtgtgtgtgtgtgtgtctcttaagtatatatattatgaaaagaaaattttgagtagttaaaatagagataaagaatgaaaggaaggaaaaggatataggagatgtggtgaatgattctgatagaaaaaaaagataaatgaggataaaactaaaatgagctatcaaacatcatagtgaataatatttctcacaaagtgaccttaataatctcagagaatttgaatttgaaacaggtaaaaagaaatttaattttaaaattcaaataaataattctaatgataaaaaagtccatttattatatcttacattatggatgtctaaagttttcaaagcataattgatctttaaattttgttaaaacaatttaatatttaatctggaaatatatgaataatacatttcctatctgatcgaggattgtttataatcttttaagtaattggatagaaccatttgttataatcttttaaataagtctttgctaacaacctcaagtcctcaacattgtcattaacgtcttcttggattatattaagatttttttttctattttattactttttatatagtatgaaaaaagaagaaagaaagtgaagcaaatcaaatctaacagaacatcaaagtatataattccaactcccaagcatgtttaaggagactcatctaatctaatgatctaacactctggggcttgagaaaaatatttttgaaaaataagggccatagtgtgtcacgaaagtcgggttcagtggtgacattcgacgaacacataaatagcatatcaaagagaattaattccgggcacctggtgtgagtgagtgaggctttgccgcgcggtttcatttcatttcaccgcagcaagttcggttcggtgactccataattcccaatcatcaccgcagcaaccaaatagggtctgcgtttcgtgcaatcaattaatccattacatgttatataatctcacacacacacacacacacacctgaaccaatttaggtttcgaggaaacggcatcatcgatggctgagaaggatgcgacgaagcttaagctgaagcatcgaagactcaagggtcacgacgacagcacaacctgctgcattgcctcacgtgaacgctctcatctcatcgtcacttccggcgatgtcagctccttctccaatttccatactcttcttatctctttccaatcactagggttcaggattcatctcctataaatttatagttttaactgtttggttgtgattctgaaacaaaacaggatggtcgtgtttgctggtttgacttgcgatgccctgatgagccgagactggtgatggatgttagcgtggagccagtttcctccctttgtttcaagtcaggtctgttttatttattataatattggttttcgacttgttattttgatgtaaatggcggaagggttcgttatagcctttttttgtatcaacatgggacaagtgtttttgaaaaatcaaacacatcccaactacaatgaaattttctatcgatacatccagtagatgagtttacttgcatcttttacaaataattgccatttgaatcagggatggaagatatgatttatgtctcctcaggaaaggaaatcaagtgttttgatgtgcgattggtaagcatttattgcactatttattttcttcttgaggatatatggatatacgttgttcttgatttattctcttgctccaccttaatttattgcattatactgatcctctgtgtattatgttgtgtgctgaaggctgccgcccaatggaagccattggagaattataattataacaaagaagagataaacaaggtagatgctagatagtaggacttgtattcaaataaatgttatgcacttaccagatcttgttgaatgtcccaactgcttcttgttatataaagtaaattgaagcaaatttgttgactgtacttaacattatccatgcagatgtagatcagaaatcgtatgtatgatttttgttgtcatcttaactgtttttgtacaagacttttatatggaatctgttttgtgtttagtggtataaaacagaattgtaagtatgattgctcttggaattttggcttagggcctgactcaaccccacaagccttataagatctatttaagccatatctctagtcaatgtggaactaaacacccgcccttcaactttgcaattaaggcagcccaaagaagccataactaagttgggccaggggtgatcgcaattaaggcgactttccaacaattgcagtgtatggctttcttcacctgcacaagatattgaaattattaaactagattacagaactattcctgaacttatagctgctttgcatttcttcattctgttggaatatcaagttatcaactgatgctatcctaggtgagcttcttttgtttaaaaatgctgttataatacaattatctgtctggttttgcaggttgtatgcaactcaaagtcctcatttcttgctgcagcagatgataatggtgaggtgaaggtatgccttgtatttatacaacaatgcttattctgatttccttagtattatctcatttatcagctctaatgaatatatcctttccacttgtaatgcattagagatataaaagtcattatctcctattctaaaagatttgatacatgccataaaacatggaaatatactgtgttgtaattgataatttaaaaactgacgtcgtttcttgtgtaatgtaatttactattcattgtttagtgtacacttttaaatctaccatttctttaatttaagaaaagccaagttaatggttaagtatcgtacattttcattttcctcattataattaaaatttcttttacagataattgacattcgtcagcaatgcctgtataaaacactacgagccggtcatacaagtgtatccttgctttttagctcttcttcactacatggatgctaattatgtaatcagaagttttatctcaacccactaatattttattttccacccccctcccccaattttttctggtattatttttttcctgtgattaataagtaatttgattttttgataatttaccttaacctagtgttgtagatatgtagcactgtggaattccttccttggagaacctgggaaggtatttacatatagtcttgcttatttttcacatatgaatctctctgtctctcctcctcctcatagtgcaattaatggtttccaatgagaaaaagatatgactgttatgtctagagtaaatatgtgaggtgtccttgtatgttagaatacccattgtcttattggaaaggaatgcagaattttttaatcaaactctacatgctaactaatcatgaagaaggaaattgttgggagggtctcaatcatggctcatgacattgcctgaggtgctttagtctcataataatgcttgtatggatattttggtcaaagaccaaaaatctgtgtattctaactctctcactctattaagcacatgagacactgaactgcttgacaatagtacctgagcatgctctagtcctagtcctatgataactggttgtttctaaattggaattcctaggaagtactgtgaataatatatgtcgagaagccattgagctagtgcaaatgtgctcatgcacagacacatattgggtgatatgtttacttttccaatatatataaatgttactaaaaaagctaaatcaagaaagaaactgacatagctggttactgcaacattttcttcttgagttcagattgtttcaactctgatttatagagtagtaatcttatgagggtttctatatctgtgttataaccattgacttcggcaaattaactttttgtttgatttggactcccttctaaatgttattaattttctgatttccatttctgataaactttgtgccattgtttcaccccaaacaacttaatttgtgcccccaataatagtaacagtataacagtcatgcatacacaatagatgtaaactactggtggttttaaagtatgaaaaaatatatttaggaaagttataacaaaaatatgagttggatagaacaatcaaaagaatttgtacaagcacaagattctatttgaaatgaaattttggaaccttgtggtataaggttttacaataacagctccatttgtttgtctaagtttcatgctagtattcaagaaacttgcacccatatctatagaaagttgactccatttttattttttattttttaccagtcattagtggaggtcttgattccatgctcatgttgtgggacttctccaaagggcgcccctacaaagtagtggattttggtataatttttcttaaatttcttactttgcctttgctaagttttgcatgagattacttgaatgatctaaattagagccttctttgatttttttttttttaatttgacatttgcaatgatattaagtcctcacttctctacggctttttttgaatgcattcagcaaaagagaacttagaggataatgattgtttttaattatgttcgaaagcttttgcaaccatagtcatccttggccatgattccacagtagataaaaacaaaaggtttggccacttaaaaatattttaccgatgaaataaaacatgaaaatgatggttggtgactattgacaatggagaatgcaagtcacaagcagttattatccaaaacatgaaaatgttgtcactgaagcctggaagttttcgatatatgtatgcatgtcacgaggcatacatgcctcagcttagataataactgaactaacagctggtacttagtgcaatgtaaattaatgatccttgtgctaattttgtttttatagtttcacagttgaaacttgcaactatattttacatggtggcattttcgtttatttacttatgcaaacatacatactcttaaaaatgataagagtaatatacaattgagatccataacgaaaacttcaatggatctaagctgttggaggatgccttatttttttgttggtcttggttagtcaatttggagaaaggatttaatatccccttctatcattggtctagtcagatgagagatggattttgctagaaagttttttgtctagtttttctaaccttcatgtgagcttaaccttaggttgacctttggcatcttaatgcgggttgtcatcatgtattaggttgccaaagttccggttggctccctggggtgttttttctttttttcagtactacttgtactcatctttatcatttatatatatatatatatatatatatatatatatattatctttgctgataaaaaaaaaaaagtaccccattacccagaggctccttgctatgcgaaagtaagagagaaagatattgtatgcaaccttacctttgcatatgtaaagaggctgttttcagattcaaattcatgaccaacaagtcatcaaggcacaatttagcactatgttagggctcgccctcaatttaataaacatgtaaaagtaaaactactaaactgttgatccttccctttcttcgctgcagctacatttgatgtgagtagtggcattgctggccggtgtgtcaatcctgcttttgttcatgcaatagctgttccagaagtcgacatgctagataaattagacaaaatatgtgctgttgcaaggggtgatggagcaattgatgtgattaatatcgaaacagaaatggctgctacaaaatcaaaaagctcttcaaattcacgaaaaggatcacactcaagatcaaaagatggtagttcatctagcaatacagacgcagatcaaaatggaaaaaagaggttgcatttggattacactttgggtggccacactgcagctgtttccagcctgtaagtcaattcattatctgtgactgcaatatagcaactgtaacactaaactcacttgtcccctaactcgtgggtgacacagggcattttcattgtttggggaaagagggaaattcttgatatctggaggaaatgataagttggtgaaggtatggaattggtcccgttattcagatgctgggttaagtgacgatgacaacaacaataatatcctacatttgaacattgaagtacctcgaaaagtgagttttgtaataaaagttaatttaattggaacttttggatgttggttaattattctgcttctgccaaatatgtctgatgcattcatttgtactctttatttggcaggtcaattggctgtgtaccacctcagctgatacagacaaccttgttgtgtgtgacacatctaaagtagtaaaggtctacactataacatagtttaaagctagatgacagtgattcttggaatgagtattcctggagagcaaacaaaacctaaaatgactgtttgaaactgtaatgttgcacttgctctgaagatcgtgttcctgacaggaaaggtgctaatggcccaaggcttttagcctagatatacctgcctaggttgccttgtgattctctccctgattcattgcctacaggaactgttcaatgatgacctataattattcatttacatggtgatggtgtgattcatgccatgtgtgtttacttgcacttttccattcgtctatgttatctcgcctcgctcttccagatatctcttgctatcttctaatttttggctgtcaaagctattatttgtaaatgtttaatgtatgctagaaattagaagtgaagcttctcttgctaagagtcctcgtgcaaatgtatttctttttacgtttaagttgatcgttttcgagtaattgttagtgaacactgaataaagtaactcactcttataagtgtgtttggatagataaaattgattttgattaaaattgattttaaagtgatgtggtttatgtatgagtattttattataaaataagttaagagtaaaattttgtatctaatgtgcaaaaattattcaaagttatttcaatttagaatcaataataaattcttctttaacataaaattaaacacgtaaaaatatattcaaaatcaattttagattctgaattaataatttaatatcaaattaaaaatacactattatcaatacttgatattataacaccctgaattacacagagccaaaatgaaaatgaatccaatgtagtgtgttgtaaaagattttgtaaaaatgattttattcttaattatagaaatcttctttaattttttaattttaaatgttttgataaaaaaaaacagtaaaaaaactattttcatggttttttatataattttttacttaataaaaaataaaatagaataatgtatttatattaaaaatgaaaataggaaataaaaacgaacattttgtcgacgtaaacaaattcttacatctatagtttttatgcactaattatatttaatttacttcaattttataatgatcttagtgttaaaatgataacaaactatggggatgccatataatcgtgttattgagaatgataggaattaactttttttagtttaggaatcatactgcacattaaaaatatattaattagtatatttaatatttcggaggataatgtgtcgtatcatttctattttcatgatttgcaggagaaatggcgtattcgatgtatatatatatggcatgacctaacgttctagcaatattgaattgaaatatatttattgctggcaacaaacaaaccaagtgatgcaaagttattcctttaaaattggaaaatcagagataattaaatcgggcagcataggctcaaaaataaactagtttttattatttcacagagaaaattgtaattttgatatccctaatttttcaaattcatgattttgattctcataatttttaattataatatttgatcccttaattttataaattaataattttggttcatctaatggattattaactaataattatgattaatagagttattaaattaattataaattaaataaaattattaattattaacaagctttaataatattattaatcctaatattgtgctccatcatgtggagtcatatgcaacggtaaaggtggaagaagagtttgcagaaaagctgagaagcccaatgttgtggaggattatgattaatatttttattaaagttttaataatttttaattaacttaataactcaattaattaaaattatttgttaataatctattaggaagatcaaaatcatcaatttataaaattaaagaaccaaatattataactaaaaatcatgggaccaaaatcatgaatttaaaaaattaagggattagaattataatttaaattattttatgtcaaagatatcccttatagtaggagaataattcattttgagacactttccaatgtattctttttttattgattaaaatttattaaaaaataaaattaagagaaatattgaattaagcaaaacataaaacttacataatttagaatttttaataaaatttaattgatgaaaacaatatttaaaagaagatattaaaaagtatgtcactaatattttccttgtaaacattgaatcaattagaaatagtatacttactccttgtacttccaaaattgacatattgttcacttcatcagctgatgtaccccaacacaactgtcatctgaagcctcccttacacttcccacattaaattgatatattgcacacttcaacgaaaaaatagactttgcttctcatcactcagatagtcttatgttgtgtgccacttaaactatgacaccaactttccaacctcagaaaaagaacccaccaccaccacctccaccatgcaaatccattgcattgctacacaattgctttctccaccccccatacgggtttatgctttttcatataaaaccaatatgagcactgattgagaagcaaagggtcactgagagatatactgacattttggccctttgataggtggtgcaaaactaaaagatggtgcaatctagtgttcccctctgcaaaacttgtggggaacaagtgggacttaatgcaaatggggaagtgtttgtggcttgtcatgaatgcaatatcccaatttgcaaggattgctttgagcatgagattaatgaggaccatagggtctgcatgaggtgtggcactccctatgaaggtaaccctttaatgtctactacattttatttctaaattccaactaagaatttataatttgcttctgtttgctacgtggattgtgactcacgttattgttatgctcccaatttcagtctccatgcaatggttatttgagactggtgatcttgggaggctaattaaaactaatgcatttaatgaatcattcgacaaagtaatagagtattagttttaatttgtgagaaagaggaaaacaaaagtatgtaacattgtttaatttatctataaatcttttaaagaaaaagtatgtaacattgtgtatgtaaaattatttcaaaaagtggtttattttctagttcaatgaattttgaaacatcataagtttgttttctttttctttttccttttgtaaattctatagagagaagaaaggaggaggaggaggatttccatgagataaaggttcacgaaaatgaggatgatgatttccatgagataaaggttcatgaaaatcaatccacaacaccttccgaaatcagtaactctcaggtgataattactaggaattattagttgcacaagtactaaatagctttaattttgaggaaaaacagaaatttttgtaatattcttacgttgttaatttgcatttgcacttataatcacaccttgaattttgtaggatgttggactccatgctagacatgtcagtacagtgtccacagtcgatagtggtaagtgaatgatacttcagacaatattttctactacaatatctttagaagtaagcattgatcattacaaaatggttttttctgtagaagtaaatgaggaatctggaaaatcaatctggaaaaatagagtggaaagctggaagggaaaggataaaaagaacaagaaaaaaaggctgcatccaaggaagaaaaggaggcctcaattcctccagagcagcagatggaagaaacacagtaagctcaatgagaaatgacaacaatttgcggagatggaaaataaactgtaatatttaacataaagcaatttttaaaatttaacaaaaaaatttgattccttaattaggttaacaatgagaagctatagaattatatgccacttgtgcataactctaatgataagtttatgtgaggatagggtagagatgtttggtttgatgaatggaatcagacaaaaacaaaaagttattaatttacaaatcctgtgagaaaacatacattttccaaggtaatgttgtctgatagttataagctgaaatctaaatataaacatttcaatatttcatccgtctaatgtgagacgaagaatcaatgaaaggcattctttttactatttcaactgtcagaagctgatgacatgagatcacaaacctttgtctttacacttcagggaactgaaattgtaattttaccagatattttatcaaatcttcctctgtatagagaacaataacaaactcaagcccctgacatattaaaaatctatttttttacctgagcatattattaattgcttgaggatcattcatcaaatttttattaaccatctgattttgcacctgctagacaattgatttaatttgaatatatttcatgtatttatgacttgttacatttctcattattgcaaatctatcataaaaattaatatatttattctataattcaaatggtgatatgatttgcaggcccgcagaggcttctgctgctgcaccactttcagtagttattccaatgtcaaaatccaaaattgcaccgtacagaactgtgataatcatgcgattgataatattgggacttttcttccattatcgagttacaaaccctgttgaaagtgcttttcctctttggttgacttctatcatctgtgagatctggtttgtattttcctgggtgctagatcagttccctaaatggagtcctatcaataggcaaacgtttattgacaatctgtctgcaaggtaaatgcacaaagttgtgaaatacttggatgtgttttgccttgtgctttaaggatgatttgcactaaaacatcatactgtagaatggaaatgtttgtttctatttctttccctaatagaaattgtgaaaggcaacctataaaaatgaactaatgaaaataatttttccatgttaaccttaattacttcccgtgtaaaaagttctacatgatgaatatgatcatgtgttgtcacatcatcgaatgattttggctgtaacgagttgataactgttacctgatgagtcaaatactttaaatgatatggtaacatattattcggggagagtggaagttttactcttaatcaaaattaaatccatacaataaagtaatatttagaagagctgatactgagcctttgctttggatgctgatgcgcacttctataataccatgccaggtttgaaagagagggtgaacccaatgaacttgcagctgttgatttctttgtcagtacagtggatcctttgaaagagccaccattgattacagcaaatacagtgctttctatccttgcggttgactatccagtggataaagtatcctgttatgtgtcagatgatggtgctgcaatgctcacatttgaatctcttgtggagactgctgactttgcaaggaagtgggtgccattttgcaggaagttttcaattgaaccaagagcacctgagttttacttctctcagaagattgatttcctgaaggacaaggtgcaaccttctttcgtgaaggagcgtagagcaatgaaggtaagtctgtaaagcttcctacttatgatttcagtgatagaacagttttgatagttagatgtatctgatttgctagtattcaccaccttgttttcccaaattgagtatcttagagcaacctcttcatgattgatttacctttcaattctgtcacagagagactatgaagagtataaagttcgagttaatgccatggtagctaaggctcagaaaacaccagaagaaggatggaccatgcaagatggtacaccttggccaggaaataactcacctgatcaccctggcatgattcaggtatatccattatttctgtatgtaatcaactatagtattgacaatgataggcataaagaaaagaacactgtataaagtactgagtcattctgtgtgaaaaaaaattgtttcctttttcatataatggaaaacatttatgttagtaagattgactagtttagttctagcaatcaataattggtacaagttcttgtatttaagcaaaatttatgtttcccatttccaggtttttcttggacacactggtgcccgtgacatagaaggaaatgaacttcccaggctggtttatgtttccagagagaaaagaccaggttaccaacatcacaagaaagctggtgctgaaaatgcactggtatgtatagatagttcactaatattttgtataaggtcattaagattttattatgcttgatgtttgtatggatttatgcaggtgagagtgtctgcagttctcacaaatgctcccttcattctcaatcttgattgtgatcattatgttaataacagcaaggccgttcgggaagcaatgtgttttctcatggatccagaagttggtagagatgtgtgttatgtgcagttcccccagagatttgatggtattgatcgcagtgattgatatgccaattgcaacacagttttctttgatgtaagttaacatcgattcaatgattttatctagagtcgacagaaaaacgacatctccttatatgcaatgatttcaccaaatacacactgcatttgcatgcatgcaatgcagtaactgttaacaaccctgaagtaaaaattgtggacacaactctgtaatttccaaccctcatccctgtttgatggacttcaattgttcatttcaggttaacatgaaaggactggatggcatccaaggaccagtatatgtggggactggatgtgttttcaatagacaagcactttatggttatagccctccttctatgcccagcttaccaagatcttcatgctgttgcttcccctcaaagaagtccaccaacgatgtctcagactttcaaagaaatgcaaagagggaagaacttgaggccgccatttttaatctcaaggaacttgacagtaagctcagttacttttttcaatcagttctagagaagcatataacagaatcttctatgcaatattcttctggtttcttttcttcttgcagattatgatgagcatgagaggtcaatgcttatttcacaaatgagctttgaaaaaacttttggcttgtctactgttttcattgaatcaacactaatggagaatggaggagttcctgaatctgcagatccctcgatgctgatcaaggaggccattcatgtaattagctgtggatatgaagaaaagactttatggggaaaagaggttgtttgcctttaatgcaaatgtttttgtacaaagtccttcaggttcttagtttcctattctctcttccaatgatatttttgttaatgtacttataccaattaaaatctcattctagatgcacagtctttactttttaactcaatttcttttttgattaattaaaacatcatcttctctttccagattggttggatttatggtttagtcactgaggatatcttgtcggggttcaagatgcaatgtcgaggatggaagtcaatttactgcatgcccttgaggcctgcattcaaagggtctgcacctatcaacttgtctgatagattgcaccaagtccttcgatgggcccttggatcaattgaaattttcctaagtaggcactgccccctctggtatggattttctggaggccgtctcaaatggctacaaagaatggcttatataaacaccattgtctaccctttcacatcccttcctctcattgcttactgttctctgcctgcaatttgcctcctcacaggaaaatttatcataccaacggtaatttcctcatctttttgttccaggatatatagttaaagagagagttgttatcaattcagcttaatccgaatggataccaattgtcctttgaaatacagtaagcaaaacaaaagaaaattatttaggttaaactatttacgtgatccctatagttgtctccattttaagttttagtccttttataagaaaacagtaaggtttggtctctgcatagtttttgtgtgacagtttatcaccgcaagaaatttttgtaacaatcttacactgtcaaaaaatgctctctggggtgagtaatagagaccaaaactttatatgtgcatcggtaatgactaaaacttgcaatttattcatgtaaggagtagaagttgaaagagacaattagatggaccaaataaatagtttgaccaattatttataaccatagttatagtcttatagaccagtctataacagttttactaatcatcaatgcctttcatcatgttgttctatacaatttgacacagctttcaaaagttgcaagtgttctctttctaggacttttcctctcaattataataaccagtgtgctcgagctgcgatggagtggtgttagtatcgaagatttgtggcgtaatgagcagttctgggttattggaggtgtttcagcccatctgtttgccgtgttccaaggacttcttaagatgttggctggtgttgacaccaacttcactgtcactgctaaggctgcagaggacagtgagtttggggaactttacttagtacagtggactactctcttgattcctccaacaactcttatcattgttaacatggttggtgttgttgctggattctctgatgcacttaatggagggtatgagtcttggggaaccctttttgggaaagttttctttgctttctgggtgatttttcatctctatccattcctcaaaggtctcatgggtcgccaaaaccgcacgccgaccattgttgttctctggtcagtgttgttggcctctgtcttttctcttgtttgggtcaagataaatccatttgtgaatacagttgacagtgaaaccatcgccgagacctgcattgccatagattgttaagtcacaaaaagaatgcttaccaaaagggtgcatgggataatgacttcatccacagcttgtgcacgttatacaaggattattatttgttagttctttgttgaacggtgtagccatgtgagctgaatggaaaatctgtaaccattagcctgagtatataatttatcaacgtgaaaaatagagattattcagtccattgaaaaaattgaaattcagttagtagtccattttttgctgtttccatcactatgacaacattaccattatattctctaacactcatgagtcatgactaaaatcaaataatactttactgaacaatttaatatttctatttaaataactaaaaacaaaataaaacatattatctaatatatgttctttaagatcaattcttaaaagagatattaacaaaaaaaaaaacttaataggatgccctgttcgtgaaaaagttatatttgaaaaaattaacaaatttattaatcatgatgatttgtgattacatgactgtactttttggtagagaaaaatccaacacctcttccttattcacaattaatagaaaatttacaattagtaaaataaaaagaaaaatgttcatgatttattagatttattttcattctttcaaataagaatatgatataattaatttcctttaataagaatatgatataattaatttcctttaataagaatctaattttaaaaagatatggtaaatatttatacaaagaaattcttgattggacacaagccaatattaaatgttaattaaataaatacactaatactacttaatacattaaatacatatgaatgtgtatgtaatattaactactccatccgtttcaaaataataaacttgttaggttattttacacaaaacaagaaaagttaatcaacaaataaaaaaaagtagtaattttctaaaatttaattttatattatctttaattcatttatacatttttttccattactaatattacaagggacataagtataaaaaaagtaattaatgttatattaaagattaaaatgacaattattttgaaataatttttttcttacacaataattataatgggacagatgaaatatatattatatttaattaatataattaacaaataatataatattattgtatgtgttaactacacataaatacatacatgggtgtgattttgattatttatattttatttaataataaaattttaatatatatttataaattttacatgcatgaaaagtcatatttaataaacatttattatttatgaaatattatacacacatatgcatacattaataatatatgtatttaatacacaataatattattattatattcatcaaatataagtatataataacttgccctcaatgcccatagtcgtagagtcattccctctctctttcccaattgcttcatttgctcgttgcagttgacattaatatggcacgtcctaacactttgttgttcctgttcatgcttcacttagcttgtgtttaaaagccagaaagcttgttttagacaagaaggtgaacccatctccaaaaaagaacagtttgtttctgagtgcatttcctaagggcattgtgccacgtacctcttcaccaagcaaaaaagggcactccgtggaggttgatgagaagctcatagcacgacatctcgtaccaatccatcgatgtattctaaaatttcttctttaatttctttctcgagatggcaccacatttgtttgttggttcagtttttgttttatggtcaaattcttttatggtgacagacgaggggattgtgaatttgtaatacaaaaaaatctattatttgtcatatgtgcctatgctttcctctgctttgcgtatttgttttccctttacaattatactctgagaaatgtaaagattagttacatttttattccttgaacttttttttaaagttaattttaagtttttaaataaaatttgatttgtcaagattttttaactttttttttcgttaagattttagtccatatcatctattgttgttaaatgatgttgtgatgttaatttaattattatttaattatattttatggttgtttattttttaacagttaaaaatcattagaaaatatttgatataactttcaaaccgaatatcaaataatttcaaataatttttaactgtccggaattactttctgttggttctcatactaagaaaatcatgaatatcatacacaaccctcaaatcaacaacaaataataataaaaattcctaaatcaacaacattttctcttttcttctgtgtcactcccaatttcacgattcctacgtttccaagttgtagctcctccttaattctaatttcttctttcgcgttatttttatcttcggccacgttcttttctttccctgaacttgaggagggttgtgccattatttattttaactctttctggagattaaagcaaaaatgaattaagagtttttattgtttaggttatgacaaattaacaaaatatatatgtattaaacaaacccttcatttgtatcactcgtttttcagacttggtgatatatattgagtgttgcaaaaagaagggtttgtgcagtacattttacatatatattatgaatttgtcataacttaaacaataaaaacttttaattcatttttgctttaaccttaagtagaagtattaaacaaagcaatggcagagcccacctcctcgagttcaaggaaagaaagaacgtggtcaaggaaaacaaagcgaaaaaagaaattagaattaaggagttacaattgtgaaattggaggaggggagaagagaaaaggttgttgattcaagggattttgtttattatttatgttgatttggggactctgtatgatcttgtatgaacttcatgatttttattattactcgtgagaatcaggaaaaagtaatttttggccgttaaaaattgttggcaactatttgatatttattttaaagttttatcaagcatttttgataatttttaatcgtcacaaaaatataataaaaaaaattgatttcgcatcaacattttgacaacatcaataaacaacacaagaactaaaactttaatgaaaaattaaaagatattgattgatcaaatttttttaaaaaaattaaaaaataaattttaaaatagtttaagatttaaaaatataattaacccaaacataaatgcatacattttgaatataatattccatttgagaaaatgttgaaggcattttgcattactcctaaatcctaaagtattatctatgataagaattaatacaatatatgtttgaaaaaaaaatatgagatatatttgaatcatttaaagattggattgtacacatcatccaagattgagtgagtaattaaaatatgttaaggattttgctctatttcatttatcctgaagagaaaaaatgggtcttgaatttcacagacaactgtagacatgagctgctgctactcattgacttattgggttttccatgaattattctttcctttaaatttcaggctatgaacttcccaacttattaaacaggaggtaagtattgtccaaagttcttacacgtcatatttacgtacgtgtttcattttctcccatttattgaaaaataacaccctactagctaaaaggtatatcttcctgtgaaaaaaaaaatattttatctgttaacatttttttaagtattatttttctttttattaaagagaaaaaaatcgttagctaaatttgttttgcaactgaatttcttaattaatatagtatgatatgattagcttataaattaatttgttccttaaacataagatcaaaaatggttcaatctcaagtctatatgtataaaataatatttgttgaaagaatcaacttgttgaacagatttcaatattttaaagaattaagtctaagctcaaggctgaaaaaatagtgttcacaaaaaaaaattcttaaattttttaatcgaataataggtctatttgtcaatatattgtttacttactcacaaagttaatttaatatgattaatagcttaaatgattggcttaacataaattagttttaattacttttataaactgttttcactattgtagttatttttattatattatgaaaactagttttggttgcataaaaaatgaaaactacttttcgtaatatgtcaaaaaaaatgattacattatgaaaattaatgtcttaaaaggatatttttgtaaaacaattacataaaaaaaaaaattgaagggtgtgcaattaaagagaaaaggatggggctgcaaatatagttcccttgggcctattaggtgctatggagcatggaagggttaggcctaattgagttttacaaacttcactctagctagttatctaattttaaacatgacgttgatatgttaagatttctcacgtgcataacaaaaataactatagtataatactcctcataaaacacaaataatcctctttctttaatttagttttaaaagttgagttagacttagtccattattaataatattttagcttgttgtttgaaaactttgttgcaacttttcaactgagattgagctaatagaaatttggccatagcgaagttgattttgatataatcgaacagactgattaaatatatagatgagcattatgaaatcttaattgtataattactacgcctatcggtgtgcacatcttagtggagtagcatgttaaagcaatataaagtgaaatccttataattgaaatatgctagtactatttctttgtaataatttagatgttttgtaagtgacacattaaataccttttggttaattctgtcacattatataagtgggctatgaaagaaagattgatctgaagagaatgtctcggatatggaagcacaaacattcaagagattacactataaaaagttgttaaatttttcattgagttgttattacttatcttggtttttctttgctccattggatagcttttcaccaaatcaatcgttggttcagtccaatattcatgagctcgagttctattgttttgggctgacacaaatacacacacaaacgcatgttagagaattttagcagtcacattgctacctgttgctctcaacatgcatgcatgtttgctaaacacattttagccatcgtattgatatactttattttctaaagtgcacgtgctcgtatccttaaccacatactctagctctattaatcatggagttatggaaaaagtttttcaccgccattcatggctgatgcactcgttacacgctcgaagacaaaagatacagaaaaacttcaaataaaaggatgtcagacagtaattgacgtattttcaaagggtttcttaaaataatatattgtaattattatgttttttcttttgatatatcaaaagaaaaaacataataattacaatatatagaagaaataaagaacttaagtataatataaaacgtaagaacagggaaactaaaatgccaaaataatcttgaaaaggagagagatcgataaagagaagaaatataataatcatcacgcccccattgcttccttttaccccgtttttgttcttctttttgttgtcgaactgaaaaccaaaccattgttgacgtgataataaagactagttatcatttatcaatttagtaaaataataaaaggtccggctattggttaaagagagaaccatcaaaggtcgagctaaatgaaataaaattaatgtaagagtagtggaactgaggaaccccatggaagagctggatcccactcgcactattctaattcagttgaaaagttctgaccccaagaaaacattcccaggtaaggtaccattaatattttaaacggataagttttcactttttttatgtaaacattagtattgattattccttccattgtaccaaagaatgaaatggaagacataaatacctcagctcaagttagattaatagggttaatgaaccttttgagtctcattttatatgaatttttagttcctaaaatatattttgatcaattttaatttcttataaattcgtttattttgttttaatttttattattaatttaaattgttaagcgatataacatgacattcacataaacatgtaatataacatatcatatgaacaaatgatattgacatgacaacagtcacccacgcaacatttttttaggaaattaatttcaattactacaacaatttgcaaatgtatcaaaatttatttttgaaaataaatcgttattaatctactagaaaatgcaatcggtagtttgaaacaattgttatatagttaagaactaaatcatataatttactcaattgttatctttaaaaaaattaactatccatgtaaacaaaattaacaaattaatagattacgtttttctaattgtcacattattttagaactaactttaatgaaaaaaaatttaattaaatatcttataaaaaagattaaaattacacatattttttttgagatttgaaagaattatatatatatatatatatatatatatacacaaacttcccttaaaatttaagaaaattataaacattttccctcaatttttaaaacctatataattttcatcaatgacgttcaaacatttgacaataagaagtgaaatctattacaaatgacatttaataagttttttttttttttcaaaatcatcaattaatttaagatacaggtggcatgcatttaaatacgatgtccatataagaagtccctctccttctgttctcactacgatcactcttcttcctactcactagtcactattgctcctgcatgcctttctgaccgttgagttgagccatgataccatcacccctccctccctgcctcatcaccattctcctcttcctcctccccaccacaaccctctcactatccctccctctcgacccaaaccaactgaaagccctccaatccctcaacatccccaccccaagagacccatgctcccaacccacctccttcctctgcgacacctccacacccttccgacacctcacctccatccaactcaccaactgttccacttccatccaccactccctctcctccacggccctcaaatccctctccaccctccacctcctcaactgccctatcactccctcctcccccatccacttccctccccacctcctctccctaacctccatcaacagcctcccccacctctccgccgcctccctctcccgcctcaaaaacctcacccacctcaccctctcctacctcaccatcaaaccctacctcatcctctcccacttcaccgccctccaaaccctaatcatctcccacgcacacctcaccggctctctccccaaacacctccattcccccaacctcacctacctcgacctctctttcaacaaccttaaaggcaacatacccccctccatcaccatgttggaaaatctccaagttttaaacctctcttccaatgcactcaagggtgagataccctcttccattggagacttgatttccctcaaaaacctctccttggctttcaattcgttctcgggcaacgtccctgattcgttatctgccatacccggtttgcttcacttggatctcagctccaaccagctcaacgggactattcccacgttcatttccgaaatgagaaacctcaaacacttgaacctcgccaacaacctccttcacggggttgtgcctttcaactcaagttttatcgacaagttggaggtgttgaaggtgggtgggaatgggaacttgtgttataaccgttccgttatgtcttccaagtttatcgtgaagcttgagattgctccttgtgataagtttgggaggccggtgtctcctccaccttcgaagcgttctaattctgcggatgatggcagtgatggggattatgattatgatgaagatgatgatgatggtggtggcagtgcccgtcacatgaaggagcatcaccatgggcccaacaaggtggttctttgtgtggcaatagcgctttcttccattgtctttctcgttgttttcctaatactgtgctccaagtgctgtcgctgaggaaaaatttgatttacgcttttctgaatttagaatataggaattttggtcatttattcaaaatggttctttgtttaattcatttatttattatacgaattcgaaggtgaagaggaagagtattgaaaaagaaatgagagattgccaaaatgtggcacccgatagaaacaggaggggaaaattaatgtgcgagttttgtttcacttgctatttttaatcaatttcttgttcggtgcaatcatttatatacaaggtatcatgatggtctttgccacttttgtaattagttgtgtattaatgtttatgaggagaagaggtggtggggatggatgatgcatatggtatccagaaagcatcatgtggtacccagaaagatgtgattaccttgtgctataaccacttatttctctcacacttctcattgaatacgccgttttgctgacccagcgagcctcaattacacttttgattattgcaccacgctttcattactctttttctctcaaataaactttgaggagcacatgtacactatcgttgctctttgtctcaaattaacctttagtaccacactttcattattattttttatccaattgacttttgagagggttaggaatacaatttctagtaaacttgagtagcacactataatttttttttttttttatcaaatagactttgagagggttaggaatacattttctaacattaggacacttttgtaatatacattactttgttgataaatattattttttggaaattataaaattagtattgatgtatttaatttaaaagagagaaatatggtagataaaaattaaaaaaaaattgaaaagaaaaaataaaataaaaggaaaatgaaaagaaaacttgacttctaaaaacaaaaatttaaaatttttcttttttttattttctttccaatttaaattttttctttttttttctttccattccaccgaacgaaccatgagtctcaggcataaagttagggttcgcaaattgtgttgtattaaaagaaaagtgcttccaaccaaaaagaaaacacaggaaagtgcctactatgccatttgtttcttatgaggcttagctttctgctaatttaaatttcttctaaattaaacctgtgaaagaatttttcaatttaatagtttatattgtttaaatggaaacttttttatagtcttttctatttgcatctcttgtactatgtaatttccctaaaaataatgtttgaccattgtttcatttgggaaagaaaaagaaaagccgaagttatatttaatttatttctggttttaatctatatatatggggtaatatagtgattccattatttattggcacaacttgatctataggagacgaacaacggtgagctggtcatggttgatcacatgatttggtaagtagggaataataatgcatggtcgtggatgtctggctatgatacaattatgatgtccatgctgattttattgtggatggtttggtatgagatgtccaacataccctgattaagtagctaaatatattacagcttggtttactttggaatgctccaattaattagccccatacgaagtacaaggaaaatattgcactgaagcctaagttggcaagtttgagcagtccaagaacgtttgagggaaaatgagaagataaatggccatgtagagaacctcaggctcaaagtaacaatctaccattattgttgtatggctaagcttgggtgaaatcaatatttgaataatgatataccttgatggcatggtatcatgtataattgtaactttgtacattatgtatattatatcacggtttcaactacagaatttttatttgtgactataaatctttacttttccttttaaaattagtagactgtaaagacttatgaatgatataatccattattattttaacccatgaaaatgattttgaagggctacatttgtgacttttgagaagtgaagttatttgattcacattcctttaacagtagacaaacaaattgaatgtgattacgtgaataagtaatgtttcagctgaatcatatacttaacggagagcaatttgaatctaaaatacctcaaacacgttacatgtttagtatgtggcgtggcatccacttgcaattatactcctaattcaaaaaatgggtacaaacacaacacactgcgctgactttctcattttttaagcatttttgtggtcattctcatttttatccccttctcaagagtcaagattggtcaacattatcagaaataaaataaaaaaaagttggaatctaaaagcaaactgagatcactcacagagtcacaaatcataaataacatcctgccactaatctatttcagagaaaaaatgttacatctgaaccccaattatagatctctgctacaatgtttttccaatccaaatatagatgtttagataagtcatccatgaataacatcacttcacagacgaagttaggacataaagttgcctctgacgtaactacaaaaacggtagcctcaatcactgattctacacactatggctatcacttcaacatacacttttttggccataacgttgtatcctaatctataatgcgtcctacatcaataagagaactgtgatcctgaaatacgcaattatcaattctcacgaagagaagaatgatacactgacatgggagaacttcccctctattgaatttttccgatgatttactagaaacctctgcaagaacataaaccatccttgaaatggtgaaaccggtttgaatctcgcaacaaaatttccctcccggttgtcttggacatgaacttccccatctcatgacagtccccacatactcttagattcttggttactctaacagtcctccctggaggcaaatttaatattccaaaagccatgggtaacttctcactgtgtccacgtagaagcacttccttctgcctattatctgcattaatcaatgaacacctcatcttattagagtaaccttccctattcattttcattcgcaattttctcagcaatgagtctatccttttggcctgggggtgtgaagtatccccagcaacaaagatattaaactttccttggacctttatcaaactacagccttgatcctttttcaatccacgtttacttatccttctttgtaactttttcacttcttcccacttttcggcctctgcatagacatttgctagaagaacataataccttgtgttctctggctcaagctcaaaaatgctctgccactttttctgctagatccacatcatgatgtatcccgcgcccagaaagcaaggcatcccaaattgcagcatctggtttaattggcatagtttcaatgaacttgtacgtcctggatagatttccagagcggataaggagatccaccatacacacatagtgttctaacttgggctcgtgttgcattcacttctcatggaatcaaagaatttccatccctctctcagtaatccagaatgagtgcaagcataaaggatggaagtgaaggaggactcttcaggctcaatacctgcaatcctcatcttttcaaatgtggatattgcttcctttccaaacccatgcatgccatatccagctatcataacagtccacaaaatcatatcctttttaggaatcatatcaaacagttgctatgcaagaactagtaacccacatttcacgtacatatcaacaagtgcacaggctacatgtaaatctgaaaagtacccttttctcaatatgtgcccatgtatctctctgcctttctccagagctgctaagcctgcacaagccattgtaatgtcatcaggcttcgactgtttttgcatgtccagaaacagctctggagtttcgttggggagtgagttttgtgaataacctccaatcattgcattccataagacaatattcttgagtggaagttgaaagaaaattaaattagcttcttccatgcttccacattttgcatacatattcatgagagcattagaaacaggcaaacttgaccccatgttgttctttttaatgtaattgtgtacctccctatatccaagatgttgctaagcatgaacaacacttgtgacagcataaatatctggcctaagacctttgctttgcattgtcaaataatccaatagcctcatcatgtagaccttatcgaacatgagcagctatctatgattgaagtccaagaaactatagttgtttcacccatcttcacaaaaacttcatttgcaccatttaaattaccacattcagaataaatgtctagtaatgtgttgttaaacatgacatccccactgaaaccaactttcactccataagcatgaagagttctacccaatgtaaggttgccaatatttgcacaagccacaagaacgttaaccacggtggccgaatccacatcaaaccccaaattcagcatctggatgaaaaactcaagtccatttctggaaaacccattcataacacacccactaatcatggaattccaggaaacaacatctctgtcactcaattcatcaaaaaaaaaaaaatacgtgcactctcagcttcaccagatttaaaataagctgcaattagagagttaacgacagcattataagaaccaaaacccagttttaaaacatactcacgaacccttttacactccctcacctttgccaatgcagcaaaacacgtcaagatacaagtaaatgtataagaatcccctctaattcccaacttctgcaatttctcaaaaagacccacactttccctgtacttaccaatcttcacatattcagacatcaaaagatttcagaggaaaaccttatcattgaggatcccatcaaatattcgtctccctttaatcaaatcaccacaattcacatacataaagactagttttgcccccaaaacctcatcaattgccatgccattggaagtgataatggaatgaaaacctctttccatcttccaaagacttaagctgagcacagagctgcaacaaagaacagtaagtattcaactcaagttcagatttttgtgaccttgagagcaattccatggcgtttcttagatcacccatttcgcagaacttgcaaatctttgcatttttgtccacggttacgtggttatgggtggtctcagacaaagccgcagagacaccaacactgctaccgcaagaaaggtccaaattcgaaggtgacagacatgttgtcctagattgtctgaagaagatgaaacaattcggagattttgcatagtttgatttgttcctatgactatgatatgttggataagtgctcaacgttgctatacttttcgacatggtcagcgttggcctctgtcttcgtcttcaaacaacattgatcccactatacatacctagttacctacctacacgaaaaagaaaaaaattatgcctcgttttcgttctgatcttctcagttcccacgtgtacttatgttaataatgttacgacattattgtttgcaaaattgaaaaaacacttcttccgttgccgggacttgaacccgggtcgctcgggtgagagccgagtatcctaaccaactagactacaacggattgatacaataagctttatattatttaattatatttattaatgactcactacgtacatatggtgatttcttgtgaatttttaaaggattacagttgaactcgaagcattcgtctccatactctcaattttaaaaaaattcccgtacccaaacctatattatatgcatgggtaatattaacttcgatgcctgtgccttttcagattggataactaaatgcccgtatctgtattttataaaacatgactaaaattgaaattatattcaaagatatttcaccaaacataatcttttagtaaaatgaggaatatgatcaaatcagtgacaaacctatatataaccttctgaatataatttgccccacaaggattttattttattttcttaatattatatgtatgtattatgtgtatgtcatacccccaacaagtttacatgtgtatttaatccataggttaaatttttttatcacgattaaattttgcccctcatatatgtagcttcaaaattaaggcaagcgttcggagcatatagcttttaagaccaattttacttaggttagaagctagaacatttgcaaacaaaaagaaggcaatagaaacacattgatgacaccaaatgacattggattctttgaacttcatactagcagacaggtcaacagagattagaaaaaagtgaaaaaacgaaaaagggagaaggaaaatcaaggagaggctccttttgtttgattgttttacagcgaataatgtaccgtttcaaagttctaacataacatttatgcctttgggaaacagtaaattatcttctttgctttactcctttataaaatggatcccgctgttatacatatctcagtaaaccacacgcactccaattaaaagaatgcaattgggaaagaatttggccataacttgccaagttggtaagtttcttaacaaccaaatttcaaggcttcagggaactacataccctgagaaatgtgaagttggtcatggttaagcattaccaccccttcagaaaaacaatatgcaaggagcaaatgatgcactcatcatttaggcaggaataaagatttgaagggaagaatagtgtttgactcctccattagaacatatttacccggaagaaccatggtagaacaaaagctattaccaggcatgccattaagaagttacaaaatggttgtccgcgccagcatccaccaaaccttctggatgaggtattatcactgtccatgaatctagtatcgttccactcttcaataaatccattatccgtaacatccgaaacattttttgcagtctcaccacatatttcacacaacctgtgatcatgaaaggtaacatagaacaaaaggaacctcaggattattgaactaaaacctagtttgaatgtgaaacaagattgaccatgcttggtgataacattcttataaccatgtaaatgtttaaaaaaaacacatgtaaactcttctctctcagcttaataaacaagaaaggatatcaaattacaaaaagaataacccacaagtacataggatgtgaatggaaaaaaaagtactgatagagcttcccccacccccacccccacccaacagctttcaaattcttaagggtcctaagatgaaaaaagtacatacattagagtaatttcaaaaacaaattagaattcaaatgaccaaaaaacaatggtattcccagaccattcttcaccaggaacagtataattgtgaaccacaaaaatttgaatttagcatacatatgaaacatcatatcgtaattcgaattttgatgtaaacaatattgaaaacagcgactgagactctgacaaagctctagattgaagcaagttgagagagagcttctcatattatttcatatattcatatactatacactaaacttatgcttgatgtcattatttggaattttggatgtcaatcaacctcagttcacaaccactagaaaccaggccatttgctaatacctcggaaaaccaaccaggtgtctgaatcaatgtagtcaaacttgaagatcgtaataggatcggagggggggtaaaagatcgtaactcgaggatcgtaagagttacgtgtatatgtaaaattatatttatatacatgcatatacataaaaaataacatagacaagaaaaacaatactggtttataattttttcactctgagatagtaacaaaaaaatactgccattccttgaactcattaatttagctaaccaggaaattattttcataaacaattgaaattgaaatacttaaatgacaatcaaatcaaattccatttttagcatcacaacgaaatccaataataatatccttattctctttgatttgcatggtatgattctgtgtaggatgattcaactcaacatatccatccattatatccagctggcacagaagattgctgtgtccatatctaattggatccaaggaagccattcgaagatgtccacagaaccaacaagttcggcccactcggtttcctctcaatattctaaacacacaaaatcaaaaccccaaactcattataaactctcccaaacccatactacactctccaaacacactcacaccaaaccaaaccaaaccaaatcccactctttatctctttctccgcgcaaacaatccttctccaaggcgacgccaccgtacaactcccgatttaagcaaagaccaacagaaggaggtgcttggttgcaaatggcagccaccgcaagcaacaacgacgtcgccgccgccgccgccggccccgtgatgagcctaatcaacaagagcctcctcgccctccgcaagaagctgaactgcaccctcgccatggaagaggctattgcccagggcaagcctctgaacaaggagcaggaagaggttctccgctccaaaccttccgtcctcgctctcatcgacgagctcgagaagctccgccagcctctcgccactgccctctccgaagagctccaaaacaacggcacctcctctcaaaactctctcgagaacgagaccgaaaacgaaacccaattgggattgaaacggatcgtcgatccgtccacctcgcaagcaaacgcgcgatcccccaacgatccgcaaagtcaacgatcctccctccgagtaacctcgtcgacccctctgaaaatcgcaagatcgcacgagtatacgatcatactcgcgatcttgacaacattggtctggatgcatttggccagctcacccctcatttaagtctattaccaatagaaactccatgtgtcacggcacataacaatgatgtcagttctccagttagagatgtaccagtaaaaattgaaacagctatgagctgcatacattaaccaactgactaatgataaacaatgaagacaatttcaaaagttcatcctcaaatttacaaatattttggagttatgagtttaatattgataagataataatagtaataaaattgtaatttagaatttcctattgatgataacgaaatttaataatgacaatagtaacgctaatgctatatgcataacagcacaagtatgcagcagaacttcaaagatttcataagacaagaaataaaagaaaaaatctacctattaagcaaaagaaaaaaacaaccaactattatcagaaaagaaataaatgttacaaattattaaaataatgcatagcccaagacgatttctttttcagaaattctgaaattgtgccaaataggattactaaatactaatactaattaatcagaaacatagaaatcctcagggcatgttcaatgttgcaggcattaacaaaaaacttcaagaaaaactaaacaaaatgttgatctacatactagaaataaacaagtattagcaaaagcaacagttacctgtttcctttaagcttgaaccatgcctcagcacaatgactatgcacaatccctagctcatctttacatgcacaaccgagctgaatcaaatctgtatgagtagtagcactacttgcagtgccaacatctgctgcttccaatggttgcccagaggccagatggcaaatcctacaaatcatttcaccttccaaattctcactaaacccatcacagctgtgacggtttatatcaatcacacatgaatttttatatgtctcagacaccccatttgtcactttcatggacaccttgttcaaccctgattcattaggttttgcttccaatttcctattatctccattgacacactcaacctgagtagaaggatctattgcaacacaagtctcagatacttccccactaaccaaatttcttgaactataactagttccttgatcaaccctatgcaatgtatcattaatttcttgtgggtcacccatgttctgatcattagcttcttgagacccctcctttagctccctattcaatcgaagatcattgtacatctcttttgaagtcccatcttccccacttacattaactccttcatccaagctatgtccacctcctgcatcaattgcatttccttcaaccaattggttcaaatcctcatccaccctttcatcgacataatccaaaatctcaacactgcctttgctttttgcctgatccataacaccaatatcaaattcttccactcagtatttcaaaacctgaagaaatttggaaaagaaactcctgacaatacataacgcattcctcccacagtgataaacccaaaaaaaaaaaaaaaaaaccttctgttatttgcagaggatgaacaatgtgatcaaataaaaggcggaaaatacatatctttcaacaaccccttttcatgttttgagacataaccttcagatattgttacaaaaacataaacacacgcaaacaaaaaggtaaaaaatgaaacttggattaccaccaataggatgtttcacccgaatcagacacagaggaggatttacctcaaacattagattttagaataaaaaatgaaactgggcatgtttgaatccaagcacagcgccttaaaagctctggactttgcccctggttttgggtgtagttggaagaatggacaaaattgtgattatttatatgtatgaaaaggagtagcagggttaggtaaggaaagtaaccgggaaaatggtatgaaaattgaaaaaagagattgagtgcatttgaatcatttgatggaatggattagtgtgttaagcaaaggataagaaattgaggattttgtctttattccatgctttttccttaaacccttttacttttactacatgttttaatgaactttgataaaattatttttaccatgatattattttttcaatgaaaaccaaacatacacacaatcactcataagtttagaaaatattgaaaataatacttaattttattattattattatttaacagcaaaaggcaaaaaaaattattgaaaaacactacttaagcacaagtttgacaagtgcaattataaagtagcatgctttctacataattacattaccaaatctatgccaatacattattatgatcattattattattattattatttaaacattacgtctttgtaatttttcagtcaaaaaaaagtcatagtaatttttaagattgattttaataattaaaatagaaaaaaatagaaatgttatacttttacattttcaatgtaataatattttttatgataaaattaactatgaaaactaacgttaacaaaattaaacaaaaggataactactaacaaatcaaaagaatttatttatcaatttataatattaattataatttaatgccagttatctaaaaaaaggccagtttaaactgaaggaatacgagaagtgcttaaatatcttgtattaaagattcctcattttgcgttttgacagtcaaattctataaaaatgtgacctatataacaattaaaatacaatgttactataactaattaattaatataaaaatcaataaatttactatataccacaatttatgatttgatataagtataaaaatacatttttcactcttaatgaataacttatttactgttttttaacaaaaaaaatgaagatgtctatatttttaatgaaatatatgtttacattttagaatagtagaacacatgtacataagtaatttttgtctattttttagtcttatattgagtaaattcataaaatgtcttatataaaaatatattaataatgtattttacactgccatttaattgataatatgagatcgagtttatgattgatctaaacaatatttaattaagataaaatttactccctcttgataagtaaaaaaaattatttcacacttattaagaattattaaatttcattaaattatattaattctaaaacaaaaatatttttttttctaaattacctttccttaaaacttaatatcaaacataacaaatgtctttgactctattaaatgaataacattttaaagataatcttgttaaataatacaaaattagttaagttttgcttatatttgagaaaaaataaataaatggttttattgcttataataaaaacaagaagaagcaggtttaaaaagattttgatccttggaaatccactcaaattcagaagatgctattcgtatggttaaaggcaggatcttcatgttagtgataagtgtattgtggatgcgattaaggcaagcattgtgcctcttatgagtgtccaatttgttcatgtgtttagagattgtattaaggtggctgaccattttgctaagtatggtctgtccttaaatcatggtttagtttcctttgtggaggtacccttggttgtagtatctactatccaagctgagtttcaatgcttggtgtaactgttccgtttttattgtttttcgggcgtttgcccctttaatcagcacaaaaaaaaaaaaaaacgcttaaaaaaaattaagtctatctatcctggctcaattggcctattgggataggcttagctcctaaaatttagaccggaaaagttgagtttaattgacccaatctttcaattaaccatttaaattttttttaaatctatatatattttaagattttataaaattatttaatcttattttttgtttatttgtagttaacccgttagcctaacataagactaagtttgaacaataaaaatttgcagcaagaaaaaaatttagcccaattcaacaatttaacactctctcctgacgagtctggaaagcctgatttaccaaatatatttattaatttagatatatttcaatcacattcagtaacttaaattcaactatatcaaaatagttatacttatatcaaactctaaattgaacaaatattaaatctattaagcaaacaaaatagaatttcatgaagagataagtaagcctactactaaaaatgatttgctcagttctcgagaatattttaccatattagttggaacaatcaaaagataagatgtaggagtactcttttattaacaaaccggaagtgtgcctcgtattaaaaaaaaaaaaaaaaaacagttctagagcaccgaaaccatgtgatatctgacaacattatttagtcaattaagaaagaaatagaagaatgattaaagttgtgctcatggcacaattagttgataaaatactgttttttttataagatggaactcttgtaaccataatttttcttctatcacgtgaaaattgtcagttgtacgtgattagctatgattttagtgttagtaaaaaggaacacaaaccatgtattaagggtagaaaataacaaattaaagaacatattcccctttaggctttagcctactatttcttgctcacgtggttctgataaactggtatttgcattaacaaatgaatattagtagaagccaagaatcaattccaggtgcatgttgattgacgaatggttccttagcggattcaaatcgtgaaccagagataatcaacaagtcgtcaatagagtgattttaggacgagaatatattaacttataataaattaaaaaaattaattaaagttttagttaatgagattttaaggattaaaaattaattttttttaaaagtgtaaggattaaaaatattaatgaaaaaatttgaaagacatttatcagtcaaataacaatttagagactaataactttaataaaaaatagtgaaaagaccttgatcaattaagtaaaaatttagaaactaaatacataattttaaaaaaaaattagagattaaaaacttagttaaattttaaaataataattaagaaatgataaagtctttattaaaacttaaaagttttgaatttttaattgattgtagtactttagtgaatgtagtatatattctacgtagatgtatgaaactcgtagttactttgcggcaagcgggacctgtgtgtttggtttgattaagaattgattataagtttataattaattttggatatattttaatatatttggttagaattgatttagggttcaaatagttttgaataattttttattgaattaaaaatttatacttgaattttactgttaattttattctataataaaatatacaaaaataaattacataattttaaaatcaatttcattcaaaattaattttatcaatattcatctaaacactgacttactgataagaggggatatgtgtatttcgtttgcagctgttggcttgattgagatttgaaagttgaaaccaggtgctggcagtggcctttgctagttgatatgaatgctcacaagtcacgaccactaatcccattcccactatgcattagtcttaaattgacaaacatcttcagataacggaatttcatttaattttctgtggaattgggggaccgaaatcactcgttgaattaatgtagcatacataaaaggcagaaatgctgctcattcttcaaatatagaagaaagcaccctgtatttaaatattcgtggtcgttaggtgatgtaagcaatatagtacatttttaactcctcattcctaattaatccctcgaccttgtgttggtaacaaggaaactacgtttacataaatagtctaattgaatattttaaaaagtgttcagatccaaacatttttttagagattttccttttgttgttggctgatttgttggttgttgtatttttaaagtactttatccgtgtttttagttgtttttcaatctttccataataataataaaaaatgactatgacgacccatggtcaagagtaaccacttaaccaattttctctccatctatcactatgtaagacatttcatgtcagatatacatttgaacctcattattcaattcacatattacacgatttgactttgacattgaaatgtttgcacaggtgaatacaagtctcataaattcactaggaacagccattgtcgctgcctgagctgtctgctccgtccatcatatttggatctttccaaacaattggcgttagaacttgaacctctaagtctaacatactaagaagtccttagaaaaccttaatagatcatttccccacgacctaaggttatcaaaggaaggcactctattaaaatatgattggtccctagctcaaggatccaatcgtccttccctcaagcgttttgagcctacaataaaaaaatattaaaacaaactaaataaattgcaagaattataatttttttcacaaccagctaaatttcttcttactcaacaaagaaaaggccactatataatctgatgataaaggagatcgaccttgcagctggcttgtgacaaaagtagggacatttgtgagtcaatttggttcacttattcatcaaaaagtcatccagacttataaaatatacatgatttagtttgattcaatttttatttaaaataaaattataatcaaaccaaatcaatattttatgatttgattaatttttgtaatttttattaaaatattatttcattaaaatctatatactttgttttcatcttttaaattaatttacattaaaaatttactaataacaatctatgaaacttattaatatgtcaaactttctataataaaaatttaccaaactttcatccattttagattaaatatattcaaaaaaagaaaacgataaacattataaaaaatttatatatataacacttacaaaatactatgaaattcaagtgacacaacataaaatacataacactaaccctaaagtaatataagtgtataatttagttcaattttaaaaacacaaatcacagactaaatcaaacagatgaatttgaattttgaaaaaaatatcattcaaataaatcagaagcaatagtgcactgctgacacgctcaaaaggacaaatctacgcataaatccccaatgtaacatggaaattaaaaagggctgaacaatataatagactcagtggagacaagtgtttgaacaaatttatctcgtaataggactacatgtagaagaataaatttatataaataagatcaagacaaaaaaagaagagtatgatatataatataaaaggagaataaaatgttcaacgagacaattcgtaaaacttaaacgtaactatgaatatcacactttaacaatgttaagcttattattatttttgttcatagagcaacctctaaacctggtttcatcaagacagaaagtaacaacttcaagaacatcaagcccttcttacattttttcttccatcttaattcctgagaggagacgaagattagtacgtataaaaaccaaatcacactcttagggttgagcctatttccttttcatggaatggatagaagatgtttgggaattgtagcaataaaagaatgaaattataacggagatttttttaaataattttattttgttcaaaactatgcactttaacgaattgaatttaccagtattttgaatgaattgtacaatttttttatctattcaattatattagaatacaatctatgagactaacatatattttttttcttagattagataccatgggtgccccttaatttattggattagagactaatctcatttgtaacatgtaattgtcattgatccaataaaattttgtatacaataagattcaaatatatattgattattttattaaataaatcattctcaatcatgtgaataaagtgaggccttataatactgcaacaacccaatgattgatgtaatagaagattcttatcctaagctatttattatgaacaatttatattaacttaaatcattagatatttttcagttaatagcaatgcttatcctaaggtattcgccattaataggaatgcatattccagttacataaaacaaattttcaccttacttgaattccatgaaccacttagtattcggttttttcccactattgttgctccccctacttatattgtcaatgataacttgcaggacttatttggtgatcaaaatagaatagaataggaaataacagaatttgagaaggcatatgttttaggttgggttttttttcctttaacaaagacatgcatattttgtttcaattttcttagcgtgttacaatatacaaattatatatattgacgttttgagttgtacatatataccttgtgcttaacatttttactaacgaaatatttgcttacaagtcataaaccagttatgaatatgctccaagaaataaattaaccaaagccaactggtagaactaccaccatccattattatattaaagcaccttaacccgaattaaaaaacgcactagtagttcataaacttatcatttttggagaaaggacaagtacttaagtagtaatatgcccagatccaagacaagactacaaaatgttggtgtgcttagagaaacctataggtttcaaaaggatggatagtactccatagtctaattcactataaagccaaagatgaggcaacctctttgattggaaaaccaggcgcagcattgatggcacatacaccataaggccactcatcgctaacattcctttttattaagaggtaaccttcctctccccagtcttttccccacgagttcttcacaatccaatagtcttcgccacccgccgaaccataacccacgattaaacaaacaagagttgcttttgttgaattctttgagcagttctcaccaccatagactccctgtgattatgagaaatcaataatttacacaattagcatacacatggaacatacccaaagttttcaattttgaataacctttaatctctaggcattattcatattcaattaaccacttgtcaataaataaagatacttacacccgcgtaaaattgaaggccagttgcatctatgctcacactaacaggctgtttgctaacacggcacaagagagcttcttctggtccaaccacaactagaaggttatcgatactaacaaccttgtttgcatttgccttcaagaaaaagaaaaagaaaaccttaaattaagaagacaaaaacaatgtctaaatttattgttccaatttatttatttattttttaaaatttgaaaatacaaaaactaagctaggaaaaaagtgttaacccagaccttgcaagtaccgttttgggctatgtaaggataatgagcttctgtgtcaatgccaccattatctataacgtaaccaaatgcattgaagtaaaagcctccagcacagccattgctagcagggtcacaatccacgagttgttgtacagatagggtgataagattcccagtaactattttgtttattccttcgatggccccggtgacactgaaagcccaatggctttctaacaaaacaacatgttaaatcagtccaaaaaattcgtgcgtgtatatatatatatatatatatatatatatatatatatatatatatatatatatttcgttaatgttgtataatgaaactattttactattcgcatctttttgaagaagtaaaaaaaaacaaaaatctatgtaaaccaatgactttgcttttagttgtttcgcaaaatatttatagtgtatgaattaattaattttgagaataaaaaattatatgttttctgaaaaatgttttttaattctaagttagaaaatcatatcatatgtagccggctacagtgaacaacacaactcattttgtcacttacttgaaaataaagagattatttttttaacacaaatttgagacatcaaaaagtttattgttgagatgcacgtatatggaaaataaaataaaatcttacggcattttccttggtctctaacttgagtgacagctcccttgttcctccaatctacagaatcaggaagattatcacagtcatcatcatcatcacgcttctgcagcttcttcgtcctactctccaagttggaggagggtatctctatttctttcaagtaggtttccgcaaactcctcaggactcatatcagcaaacttgttcagacccaagcgatgctgcgtcggtgacttcctcttcgcattcatctcattgatatacctcagattcctttggaatatctggaacctctttgccttctcctctgggttgccatattcacgcttatgctccttctgccacacttgaaacacttcttcatcctcccaagaaaacttctccaactggtcactggacatagcaagggagagactacatgtgaaggaaacaaggagcaagaaaacaataaataacttggtcatttggaaagtcatcattcacagaaatcagtaaccttgttaatggttatgccgttcttgtgaagctgcgtgacatatatattgagtccgtgatgaagttgcttcacctgccacctagctgttaggtgaactagtattgatcgaatactcacgtttaattcgtttcctattttttatgccttttttttgtttctcttgcgaaaatgttaaaaattatactccgacacacattcttttagacatattttattaaaaattacaaaagtttgtaaaataaatcacatgttatttaaccattctctgatttttatttcatagtttcaataaattttgattaattaaagaaaatgtgtcccaacactaacgctaaagaatgtgttcataatatatctcatttttctttggttaaattttagttttgattcttttataatttttaatctgtagttttgattttcctgtttttctatgtgattttgttttttctattttaaaaaaattacaattttcgttcaatctttaattatgcatacatttatttctttcattttatattttaattaattaaattattttaaatgatatattaagtgaatattttagattaatagggtttaattggaccaaaataaaagaaaaaaatatttggaaaattgagaattggattaaattttaaaaattttaaaatagagagacaaaaatcatgataaaaatcaggagaaccaaattacatattaaaaattataaaaaagtaaaattataatttgattttttgtttttaggtggtccaatccaaatttgtgagtggagtaagtacgtgttattcattcttgtcatataccactagaatttatttatatgtaattttattcgcacgagtctcatgccatcttcccactcgagaggtcccccaacgctattttttttataccaaaatgataaaaaaaaaaacgatatttttgtaatggtgataattgtcccatataaatttacagtacttatgaacatttaagtaaaaatttgaatttcgcagagttaatttttttatatatctagttattgtattgaatttttactattaagtgaattcaagtttgaattctctattttaaataagaagtaaatttcgaaagaatgcgttaatataaaattatttataaacttttagctaaaaacttaagcgtacgttaacggtaattcataacaatttatactgaaatttaatagttattgacattgtccatggtccatgggtgttcttttgcaaattatagtgcagaaaaagacgagaaagatgtaatactggcgtttctccgcaggactgaggacgtgcattacctctgccaaaccagtgaatgagaagttggcttttttcatcaaaatagtgtaatattttgaattaattattaaaataataaatttttaaagaaattacaaatatttttatccttttattgggaaaataattttaagtgtaaaattttaaaaatttatatcatttacaattgaaaagtattttacttttatcgactaaaactatcaaaattattttataagtgatcatgattgaattagatatgattattatgaataaaaaaattattttaaatattttaatgtagttgtatattcataatttatgttaaacagtaattactcaataataatctttatatcattacctaatgaattctagttttatgtataaaaccaagattcaaactctaataaacatatttaacaaagtcaatttgacaatttttttagaggactcaattatatgtcaattgtgctggaatttgttattataaattcatttttttgaagtgagatagtatatacataattaaaatacataataaacttaatttttacaattcaaattggtaaataaagattaagaaaaacagaaaaatatttaaaaatgctaataaattaaatttaagatatatttgaaatttaaaattatctacatacatatatactcattaatttttaaaataattttatttaactaaataattgtaaacagtaattaatgtgttaaaattaaggttgaattgtttgactaatattcgaattcatttgaggaaaataatttttgatcaaattttatttatttttgatccaattccaaattaatcatatttgttttctctcattgtggcagaaaagaaaatccaatttgcttaaagggccgggattcttctctttaatgtttatttctctcttctatcttttttcactctctttctcctcactaatacaaaataaaaattaaatagtagatcagtagaaaaagcaagcgcgtggttgcaacggcacctcatcacagtgaaaaaaagtgtaccgactaatagcattggagtggaatatttagtccatcctgttgtcttcgtcagacacatgtaaaatccgaaagtaggcataaagcaaaagaagacgaaataccgaacctttctgtctctatctttgctttcctttattcttactcattcattccattttgcaacttaccaaccacttccttgtgacgtgtttcattcatctctcatgggactgaactctctcacccagtgatgttcactcactacttatttgatgattctattctatcccattttttgagttttatctggccaattcgcattcttaatgctacatgaccatgaaaaaaaaaaaaaaacacacctaccccagacactattcaatttggcttgaactgcaaatgcctgggatgaccacgtcccatgtttcatcctgttattaaataggtttgtttgatctttttcctcattaccatttatttatttattttactctagtgggaccttaagttaagcttgttagctgctatatatgatgattcatgaaagttctcttgctttatctgtttaatttattaattgtacgtagttacctctgttgttgtttttttgatagcaagacttgcaatggttaaatatttgtataattggcttattgagaagaggaaaataggtttttataggaatccgatcatcccaggcttgaatatttggtttcctaagcaacaaatgtcaaaacttttataactaaagtgcatacctttttttcccgttccacaatctcaatagaccattacagaatttctctttttctttggttaatggtggagaaaacggaaagttatttcagtcatcaatatcctgttatcatgagttcattttggtttaaaattttgctctctggttgcattattgtacttctctgatcttggttcaagtcggttgaattgaaatttgaaacagagaatctgctgtttaaattgtaatttaaaatgtaatgatctggttcctgcaccctcttttcagattttcttgattgaatagaaggattcttataccacatcctttttgtgctgaaattagtagcatatgatattcccttgattcttgaacttattattgagagtgcaacatagaagagttcagttgagttggtgtggaacatgatgaatgaaaggaaattgaatattgatgctcctcttatgtcggtgaggcgctcttttggtacatcaccatccttaactgaagcaaatagaaagatattagagaagccacaaacacttccacactacaaatcagattccattttggatcaggtaacagaacctgtcgcagtgtctttcaattgggagcatatccctggaaggtcaaaggattatgatggatcagaacctcaacctcctacaaaggcttcaattaccccaactccccccactggaaaatccacaaatgtggccaaacaatcattggaaaaggaacctaatgttgcaaataactttaggcccccaagcatatcaaattctttaagtgagaaaatagattgtgacaaagaacgtaaagatgagaaaataaaaaaggtggaagagaatgatgactatgatgatgatggtgatgtttattctgatgcacttgaaacactgtcacctacagagccattgtctatgaactgtagtgtgagtggtgtgagtggcttagataatgtggatgcggatatgtgtggagcctcttctactgataaacaagctcatgatttcatgatgagcaggtttttaactgcagcaaaggctatgactatacagcctcctcaatatgcttcttctagaaagcaaactgttctgacagaacaacctagggaatttatcaaattggttcctgaacaaaagaagtcatttgttagtagacatatcgctgacattgtaccatatactggtcaatgtcgagaggaggaagaagaagaggaggaaagtgacgatgaaactaatgattatgcaaataattcagctaaaggttgcggattatttccccgcttatgtgttagaaattcattgtgcttattaaattcaatgcctgggacgaaaatggggaatcagtttcccttgtattctgcctatgaggttggaaaacctgataaaagttctcatagtcgctcgcatagaccagctccatctataaagaaggtaacaactacataactcttactttctattcttgcattgcacccttctatagtcaattgtacccttcatgacatttctatgtgaaaattttgtacctatttatctcttcattaatattcacaaaatttgtatctatttctctatttaataccccccatgaagagagattgacacaatgtcacattataagtacaataaaattcaacattggaagatccattcccatttcccacccttaccctccttctgtatattaacactttcaccaatcatgacttgaactcattttaaccagagtcatgaatttttgctgcaggcttgggatgttattaataagagaaaatcaagctctagagctgcatcaccagacaagcaggatgtaattaaaaaatggactagtgaatcaagcaggtatacctactcaggtgaattgaagcagctaggtaggctctctccctttcgtcgttcaagagctgtttctgctggcgtgtctccttttcgaagtaaacctcaacctccctttcctggagcaaagttgcttggtgattccaaacaagatgataataatcattctggcaaattgaaattcccgagtagagggcattcaagtattcaagaggtgctatcacaagaagcaaaaaaaagctatagcttcgggagccttactattgaaaagacattgtacatagatactgcaagtacaataaaatcatcatgctctagttcgcgttctttaggtaacacaacagtggtaggaaaagacagaaattccctactagattattttcgagatatgaagcacctagaagctttggaggagaatttggattcccaagtgttgaatcctgtggatgccaattctccaactttgtctagcatgttacatctcatggccaaagaagataaagctgaaagattggcagccgatcaagaaattaatcaaaagtcgatgtccttgcaacttgtgccaagttcatttgacaaagatgcagagatcaacaagcagcaaattgtagtggttgatgattcaggaaaagttggcaatgaatatgttctgcatcctcttgccccaccaccattgccaaagtcaccttctgaatcctggctttgtcgtgccctgcctctagtttcttctaagaattcattcccacgttcaaatcaaggtacacattcccaggctaaaaggcagggttttagtagagcatcaagctatactaagtgggaaacaaaagtgaaatcttcgaatttgaatcatgatcatataacctgttctaaggtaaccttattaatccctttagcctttcattttttatttttagtcttcccccaatggttaagtcacaaaaccgataaaaactcacatttaacttttctctacaggaactactcgtgtataaatctcagcatatgaaatcatagagatagaattctggcgtgtatatcatgttatggtccaagcttttcatgtcctttattttttttcaggcttatgggatttagttctccttctattggtttttggcatgacagcataggttagatttttgtttttttatacaccctcatatcttatgttattattttctattggattttgtttccatttgttgacttcttaatcttgattcaatgattcttgacatcatatcagtattttacagagaggaatcaatataatttttggtgatcaataaaaacaatgaagcttctttggactagtggtactttgggtggattgaaaattacagaagctacccccagagaagtgcatatgcactactattgtttgccttttcaccttgttggtacttcctgacagcttgctaatcaagggaaaagaaccttctgtttcatcatatgcagctaatctttaagtatcgacattttatacatatgaatgtatatataaacgacattagtaattactgttattcatgcataattgtttcttctttttatatacattattacagacataaattattcttgagatttttgtctgtctttttctttcactttcataaatttatgtccaacagtccaagtatgaaaatcaaactaatttccgatttagggtgcaatagcacttattcaatgggaatttattcataagcttgattattataataagttacaaaaagaaaaaaaaatactatagaaatgtcataactaacttttctaaggttaaaaaaataagcttcatatgagctcttcatgatccttctagtaaacctagcacgtgaacagggcaaagtacatctcattgatcacagtcttgacggcttattaatcaaaaagattgaaaattattttgtttatgattttttagttcttttatgatttacacaataaatattattttattttattttttgatcaatattttaaacacactgattaataataccttatccaaaatacttgttctacattatttaaatgctatgaaaactgaagcacacaattttcaagttttctctgacaaatacattgactgcaacttcttaagtatgtccatttgtcttagatggatgaataaaatcctcttcaatactggaaatttctggtaagagcacacaaaatctttgagtctttctctctcttgccgaaaactttaaaaggaaccaaactcgagatggatgtggggaatggtttgaggtggccggttgatgtcttcgacatggattgttgacttagaataagactttgaaaagtgttgactctgatgtgcttgatagaccaagaatcaagttttgttgggatttgtcaatgttttgatgtgactaagatgatacgaaaattagtagatgcttaaaatgtattttggcgctcaagttaataataattccatctaagtgactatgtatattgaacattatgtgacatcatttttttcacattctcattcgaagtttactatcttcatttttttcatcttcaataaaacatgtagtgaactctgagtgggcttttaatttttcaatcttcgagggagttattgtaactgcctcaaggttttgtgcaacaatcatgataattcaatattattttaaaattcctctaattaataccctaatttcctataaatagttttgcccccttttcttatgtttatcatttttcacgaagtaactttctttttgtttctacttccaacaattttctagcaaaaattaattattagaaaaaattaaaagtggccaataaatttttttaacaatcatcaacataatcaataaataatttgtatctataacatgataacaaaaataaaagcaccatcccatctacacacgttagagcaacatcatacacacaagtagaaatcctcttcagttattggaaatctctagtagaagagaagactaacccatatgtaccacttccctttgcaaaaggcaagatgacatgtagcatagatagacgtgatacccactacacatgcatgtcaagtcatgtgtaataaaattgactttttttttttaattatcaaaatgagttattttgtaggtgttttacacaactaattacctgtcatgttttgtcaagtatatatcttatatattttgtttgtcttgtgttaaaaagcaccaccttaataagtgttagtcatccgtatttattgtcaatttgaatgagaaaattaagtaaaaatgtgacaagagaattagttattaaaattagtaatttaacattcactcgagcaacactaaatacctaacaaagatggtgcatattattagctgaaatgcttttgtatattcatcaccctcgaagaaaacaagaaatgctcctcatatataccagagagagagcaggaagaaaaaggcatatgtaacaaactctcactaaccaagcacactactgcatcacaccattagctgtgtgaggttataacagaaaagaataaaacaataagaaaaacgtttctagaaataaaagaaaaactaaaaactaattataatcttgatactccccctcaagatggagagtgtatatttaacactcccatcttgttgagcaatgttgtaaactggccaggaaacaatggcttggttaataagtctgccaattgcatttgagaagaaacatgcaacaccttcacttctcctttcaacaccttttctctaactagatggcaatctatctctatgtgctttgtcctctcatggaaaactgaattttccgcaatgtgtaaagctgctttattgtcacaaaaaatcaatgctgcttcctgatgtaatatgccaaaattaatcgagagagaccttaaccaaatgagctcacatgtaacattagccattgctctatactctgcttcggctgaagatctggctactgttggttgcttctttgacttccaacttatcaatgaatcccctaggaagacgcaaaaaccagtaatagatcttctagtatccttacatgctccccaatctgaatctgaatatgctttcaattttaattgcccagtactaggataaaaaatgccttgcccaaccgttccttttacatattgcagaagcctgtggacaacatttaaatgaggttttctgggatgagctaaaaattggctgagcctattcactgcatatgataaatctggtcttgtaatagttaaataaagtaggcgtccaatcaaccttctatagggtagaggatcatctaataattcaccttcttcttgtgacagctttatgttgacctccattggagtagtttttgctttgcatccagttagactagcatccttcaaaatctgcaatgcatatcctctttgacaaatggaaatccctttaagagagcgtgctatttctataccaagaaagtacttcaaattacctagatccttcaacttaaaatgattgttcaagtaaccttttagttgttgcacttcagtatcattatttccagccactataatatcatccacatatactaaaatggccagaaaacaatctcttttcctttttacaaaaaaggaagaatctgctacagattgttcaaggccaccagcaatcaaaacttgtgaaaacttgtgaaaccattgtctcgaagcttgtttgagaccacataaggacttgtgcaatttacaaactatgttgggtggaagaggctccccctcatggagataaccgagaggtggaaccatgaagacttcttcatccaactcaccatgaagaaaagcattgtttatgtcaatgtgagtaagagaccagccattcaaggaggctaaagcaagtagtaaacgcactgaagttattttagctactggtgagaatgtatcaaagaaatcaatgccttcttgttgattaaaaccttgagccacgagacgagccttataacgttctaaggtaccatcagcatgcaacttaaccttgtagatccatttagaaccaatggcttgtttgccagagggaaggggaaccagagaccatgtcccatttgtttctaaagcatcaatttctaattgcattgcctgctgccaggaaggaactttgacagcttcatagaaggaagaaggttcaggatgtaaattaaccgagccaataaaagcagcatatgaagaggatagcttagaattgcagagaatatgctctagaggatgctgtgtagaagaattcacagtataacaatgatagtccttcaaatatgtaggtggtttgacaaccctatcagacactcttcgaatttcaagtggctgggaggggaaactggaatccttatcaactaagggatttgaagaagggacttgagtaggtaaaacagaatcagcaaatatctcattagtatgtggaggcagatgtttgaagggaaactcattttcatgaaaaacaacatcccttgaaatgaaaaccttatttgttgtgacatctagaattttataagctttgtacccaggtggataaccaagaaacacacctgggtactatattgtgcttgttactcaccatcttactggaacaaattaccacacctggaacagagctatgtccacggctctcactgcaaagaacaaattgcagttcgttgatggttcccttccttccccagattccgaagacttactccattctttttggattcgatgcaacaacatggtgacttcctggttgctcaattccatctcacgcgaaatcgctgatagtctcctctacatacccactgcagcagggatttgggttgatctcaaagagtgatttcaacaaggaaatggtcctcggatttttcaattgaaatctcaaattaccacactcactcaaggtgctctagatgtcaactcatattatacacgattgaagatactttgggatgagttgaaggaatttgagccactgccttcctgccgttgtggtggactgaaagactggaacctctttcgtgagcaagagcgctccatccagtttttgatgggacttaacgattccttttcttcaacccgggcacagatcttgctcatggatcctttgccatcccttggaaaagttttctctcttgtgtgtaaaatcctcaaataaataaatagatatatatttatggtcttaaccataataataataaaataaattttattaaaataaggacaaaatttagagattttagctagccacgtgaaaaattcctctgataacccaaatctttaaaaatctgctgaagaagctaaggtggcattaagaggaacaaatcatcaaaagaaagcctcaagcagcttccacgttgatgaaaaacattaatgaggaaacattgtaatgattagtttagataaaatcttccaaaaattagttacatagtaactaaactcaatcttgcccggttataatctaaccaaatataacactataaatacccctacaactcagaaaaacacacaacactatcagttttcctaaaaccttctctctaccattttctcttacgtgaaatttttctgtcttaaactattcccgacaatccttactcggtttatcaaaattttccaggtaggctaggcttcaatttataacttaaaaatttactaagtaaaatttatgtaattattagattttgtttaactattataataaggtttacaataggaatacggtgatatttttagattacacagggatttatacattgttacgtaaataaatctatggtttataaacaatttagtattaactattagtattaaaatagtaagatttaataaagatatagtaaattatagtatataactacgtgaataattaaagaccttatgtatataaccttttgaatagcaaaatgaaaaatatagtatattagaaaggtagtaagagacttggtctctgcatgaatgaaactacgcttatttcttttaagcttaagaagtgatgttatacgagtgcaacggaggctaaacttatgaagcctcggtcatgtgctgctcttatcattattttaatctttttggaaccatgatgcttcccagtccattcatataaataacgtcatcgttactgttttcatttttttattaatctagctaggctcatctagtttggcttattctttcattttacctagcaagttcatttactactgcaaccctccaccaaccaaaaatgcatgcataagttttcgagccaccatactaaccgattactacttccccaagggaccctaccccggccagcttttgcatgaactcggactgtatcatgcaagtctacccacaactagctcggccaacacaaactcagccacttctgttgttcgtccacatacccttgcagaccccattcagctcggccacacctattcaaaccagctatccaccttcacctcagcatgatcggatatctccatcccggtatggccaggtaccaacacctatcccggcctgtacctagcttggcctgcatccatttcggactgcacgtatgcggtctgaacccaacccgacatgcacacatcttaataatcttgaaaccggacactcaccacacactgcatgttcctactcggacagcagtataccaggccaatcataccaaccgacctcggcagccatttgtactcggcacggaccttgacccaggcagccatttgtacccggcacggaccttgaccccggcagccatttgtactcggcacggaccttgaccccggcagccatttgttcccggcacggaccttgaccccggcagccatttgtactcggcacggaccttgaccccggcagccatttgtacccggcacggaccttgaccccggcagccatttgtacccggcacggaccttgaccccggcagccatttgtactcggcacggaccttgacccctgcagccatttgtacccggcacggaccttgaccccggcagccatttgtacccggcacggaccttgaccccggcagccatttgtactcggcacggaccttgaccccggcagccatttgtactcggcacggaccttgacccaggcagccatttgtactcggcacggaccttgacccaggcagccatttgtactcggcacggaccttgacccaggcagccatttgtactcggcacggaccttgaccccggcagccatttgtacccggcacggaccttgaattcagcatgtattcgttctaggcacatgcacacatgcaaaccggccatatatcacctcggcaaccaactaacccggtaccatgcttacccggccataaccaatagccatgtcaacccttaggcatcccctcatctttccgatcactaatgtcagatcgaacccggccaaccatgaccccggtcatatgaaaaacaaacccggctaaccatgactacccggatcttagcttggtatgaacggtcttcccgaaatccggccaaccatgaaaccaggtcatacccatagaacatacctttcgacctcatcatcaccggtctctatgctctttttataccattaaaatttccccagcaattatataaatatatatataaagatatccagcgggttcatacgatacaatttgggttttgttttatatatatatatatatatatatatatatatatatgttgggaagggcatcttaagccataactgtgttcccagttcttacgtaagcatatatgactgtttgatttaatacttcgtactagtttgctatgaaccaaatattataggtattgatatgtgtatatataactttaattataattgcgagcaaaataataaagtataaataatacaggtaaagttacacggataccataactcatgacgaagagctatgttgaatatatgtgaagaaattatttactaagaattttatcaactcggtcttggctatatatatattatacttcaaaccttaatattggcagctcataaatattaaatttctcctgttggtacactataacgaggattaagtatgaaatgttatatatcttatattatgaatttttgtgtgatgttacaaatgtataagattgacccaagtttcatatgatggaaatcgggcctatgatgagagatcaggtgctaatacatggaaattcatgcatgattagcgtaagacggccgcagcattcctacatgatgtacacatgtagaggccatgtgcacctgtgactattgcatttcatttcattcatacattcatgctacgcagatatattgatttatttgttattctgttaaattgttgattagtcttgctttattttactaacctgctaatatgtttggtggtttagatttgcctactgagaaatttatttctcattagatttatttaatgttttatcttagatggcgtcaatcataatctttcttgattctctggatatcgcctggtacatggatgaagtccgccactgctatgtagttaccatgcaacctgtgttgcgtgctcatatatattttggtgcccattttcctgtctcagtctttaatgaagcatttaatccctacgatccctttcttcagatggctcctgtatatccaaaccctgccacagatcccatcatcgtgctcagcgaagaggatagcaatggagaccatatttaaatgaagggacaagaactttgtaaataaataagaatattgcagtactatgagaataggaatgtaaactgaagctagtatgaaaaatatgagaagtattttgtaataaaaataatgtatgtatctagttcctggtgtattaatatctcttgctcctaacttaaaaaaaaaaaaaaaaaacacaaaggatttaaataaaggaaaataaataattaaataacttaagtaatgaaataagtacttaaaattatttagtatgttacattgtgctccaggaagaacgtcaaagaaacatgcatttgggtgtcccttctctcccgattgtgaatgctgctcagttgccaggaaagggtcgtcgtccgttttgtactcattgctcaatgactggtcacactgttgacaaatgcttccgcctccatggatacccacctggcttcaagggacgcgcaaaagggaacgtaggaggcagtagccccaaactgggccaaaattcgacgggctcagttttatctgatgggcattttccccatactgccccaactggcccaaactccaacctcagcccagatcaggtttcacagctgttggcattacttcatcactccaatcccgtttctcctgtccaaagtacaacctcaatacatccaactgccacgtttcgctcttcttgtccttccattgagtcatccccagttgattgtgcttctatctcctctgtagcacatgtgtccggtgagtcatctgcattttcttcctcctcgtggatattagatacaggtgccacacatcatgtttgttgtgatctcaattgctttctctcttcatctccaattgttggtttctttgttaatctccctaatggcacttccatttcagtgccacgtttgggctctgataccatattagctgaaatgcttttgtatattcatcaccctcgaagaaaacaagaaatgctcctcatatataccagagagagagcaggaaagaaaaaagcatatgtaacaaactctcactaaccaagcacactactgcatcacaccattagctgtgtgagattataacagaaaagaataaaacaataagaaaaacgtttctagaaataaaagaaaaactaaaaactaattataatcttgatacatatcaggacaacacctcttgcatcttatatagcaaaaatcatccataacagataaatagtttaataaaacacctactttagtaattaattttgtgaattaaaccattttgttaaaagagtcaataaaattcgttgaggtttcttcaatctctatctgaattaaaagattccctaggtttctctgttgcatgaacagttactgtgctatagaatttataactaagaaaaaatattttttatctaccaaaatattgagtattattttaaaaacgaaataaatatacatataaattctaaaacatttttttgggggggggggggggggggagcgccgcgcatcctgatcagcagatacagttcttaaacaaaattcaactgaattcttggatgatcgattttggaatagaaagtgagagagggattcacattcacttgttcttctatactttggtatagagagtgtgacagagagaataaacaattcaagtactcttttatatagctgcttcaaaacttaactttaactacacaactagtgatattcaacaaaccaaaaacacaatcactagtaagtaaaaaatccacgctcatcataaaactcaacttgtgtgtgcaactcaatttcttttctaacacatagctactaaatccatgcattttccaacataaatcttcttctctgtaggtgcagaagtactaatggagctcttgcagtaaggcctgatagccatactctcagtgttgctgaactacgtatccattggatgtacttacacaaaaggttagcgccagaacatgatgaaatatgtgttattttccttcgctctcttttattttactttgtgccttatcaaaccaaatactagcacacacaaaatctctctgttgaaaactcactcgtaatcacgaccaccacattcattttacattcaaatccgatttaattattattattatttttggtgtgaggataaaccctatgtactggcaagcccataatttagcgttgtagcgacatataattgtgtaacttaatttgttttagtatctatatatctttactcagactatatgaatggttgggttgtggtatttgcattatacattgacatggttataaattctatgaaagtgaaagtttcgtgttgatttcttgggtttctctgcaatgatcagtcttgccatcattgttgccatctctctgacttaaactcagtcgcaaatcaggcacccattgcttctctttctgcaatttttcttgattcgactgcatttgattaaaaaataaataaaaattctattaatagtgaaaaaggtaaaaaaaaaaaaaaaaaaaagttcaatacattaatagtactcatgcgaatatgaaggtttttttaatatatctcactactaaaaatcaatgaattagtgatcaaatttagtaatgaaaaatttcttttttattatatgttagtgatggattttttaaaattacacataaattattctctcagtaattttaatttttctaagtgtctagtttttatttatttttttattttaaaaagtataaaaaaaatatgcttttaattcttgaaaaggattgaaaatgtaatagtttcattttattaaatataaagactaaaaataaatctaatttatatgaaaaaatggcatattttcaagcaccaaaatatatttaagccaaaaaaaaaagaacatacaaatattttagtttcttaagtcttaattaccttaatccgaaatggaggctcaaattctagctttaaactgttggaatagttgcgatgctcgtcggagtttgatagatgctccttgattcttgtgttgtttccaaagtttaactcacctggtctaagcagagatgctgcagtggtgccaaattgatgtacaacaggttgtgacacagcattagaagtaatattggcaggtaaccttttcttccagtgatggttgttcataatatctaagggaggccactttttctcttcaagaaactggcttggtctcatgggtgcaatgctggtggcatcctttaggttaattttgtttgaagatattgatcttccttgcgtttgtaaggctgttgaggagataacttcgttgctaaagtaacttggtcttctaaaaggttgatgattattgaagtaccattgttggtgcctaatgatagataggtatatattttgcaaatatgtattaattagattgcaaaaccatggaaaatatagggaataaaatcaattaaaatgtgcatgcatggttaccttgaatcgatggcttttgaatgtgaatgtgatagggaggagggatgcatgagaccctgcaaataactgtggtcgttgtaatcacttgctagaataattcctccatttcccatcttaaaatgttgactaggattcatggattgatgggctacatgagaaatacgaccaagttcatgggttgatttgtatgtttgacctaatactgcaaagtgaatatggatgaatatatagtaaaaatgacaggtaaaatcaagtaatcccaaccttaattatgtccttctcttagaagaaaagcttctaatttgctgggaatcataggttagaaattttagtttatcatttttagtatgtattttttaaaaaaataacattcttggaaaagaatgttttctagaaatgttttataatcagttatccactaaaacttttcatgtgaaaggtgaaaatcttgtttttttttgggtttaattttttttattaaaataaaaatatcatattattcttcattaaattatataatatgataaataattaaaataacttctttaattcttaaaaaaattatctaataatttttaataattaatcaaacaaattttatttataatcagaaagtatgagattcagaattcatgattctagtaattctcatgcataccaaacgccccgctggagtcttaccgtttaattacctcctattttttttttataataagacttgattgagaacgagctgagtacaaaagataccgaacccatagtgataagacctataactacaacgtgactaagattaacaatacaaaacattctatggatctatatacaaataactgaaatgaaatgagaaaaaagacagccatgaccccctcttggcagagactcaagaccaagactaggaccaaattttaatccagtctgttatagaaacaaaatcaaaatgaccatgattaatcttaattaaataatgttctagagtaacaatcattatggttaaaccacgaaatactaaaccagcaaccgtccagcttaatttttctttcctctctcaactggttacattacaatgatcaatgctattagatgaaagcacaatactaagacaccattgatggattatctctagagtttaaagttactttaaagttgaagttaaaaataaattttttaatttgaagtaaaaaatgtttaataattatatgaattttcaagcatgaaagttacttattatttatatttttcttcattaaaaagctattttttttcttaaaattttgtttgattcaacttctctttttaagaaaaaagagagacccaaaaataagttggccaaacattacttaaaatcactccatttgattggtttcctttgaatagttttattaaacttcttaaaagcagtaaaaaaagcatttttaaaaaacattgtttcttataattaaattatattatgaaaaaaagctagatattaatgaaaagaagttaattacttgcctctttaagtataacacttgtcattcttattgttattctaagctaatcaaccttcctttctctatatcttgggtgttattataacatcttcaatgtgagttgtgaactttgcatccggcattataggagaggaaactatatcttacaaaatatataagatatatatcaaaggatcatactaattaagttgtattcctatcttattgtacacaaaaaaggattcatttgctttagaacgctttgcaagatttaaaatagttctcaccttgcccagcctcgtcgagtttcttgcttcgatacatctgaaggaaaattgcataacaatgaatttatttattgcaataaaacatcaatatttaagtttcaaggggaaaaaatacaatatcaaacccgcaattttgttgctacctgcaagtgactcttgacatgagcaatgctgaggcctctcacattcattagctgaagcaccaatttgggtgttgctcctgcaccaatagatgcaaagatttcagccaaacattttagggcaaataataggctttttttactaactaaaatttcttaagagagaatacaagggtactgtaaatggaacacaaaactctagtaatatcatattaaaaggctaaataaagacaaactttatgatcaatacatcaataaaataaaataaaaaacaatgaactctactggtcttgaccttgagcccattaccaatattatatgaatttaatagacatacataaaataattttatattaatattctataaaattattattgatatcataattattataaaaattaataaatttattatacatgataatttatgaagaaatgagtgcatagcatattttctcattgtatatagtaagtatttctttaatccatgtctcacttactttcttgacctccaagcctttcaacagcatgcacaaaggatagatgaagttcaggtgtccaccgaagccgaggcatctttgatctaacatattgtctcacgccacctctccgttcattacttccttcctttgttatgctgctacttttattagttgaagtaccttcttcctttgcttcctcgcatccctcatcatcgttgtcattgttatcttcactactagcttcttcattcaaatcaaaggatgagcatttctgggatgatcccattgaagagtcatcatcagcatgttcattcctcttatattcatctgacatatttatttgttgttgctcgatcaggatcacctccaacttcaattctttatcaatgtgtacaaattataaatggcatttcatgtctgaaacaaacacgacattaatataaatttaaatgtgcagatcaaagttggcaaaataaacaatataagggaatagttatttaaagaagaatttgtgagaacaggctgtcgtttctctacaacaattacgaagctttaaaattcaatggtaaagtaatagtcactagctagattacaagaaattgtaccaaagaaaattactaagcaatgaatagtgagaagttatggcacaaagagcagtagtaggtcaaattgaagaattatagtataaaagtgcaaccaacttctctaccgagaagatgtgaataaaatttgtgagggatgtgttaagtactcagatctatgtatttaagtggaaaggaattaactcaagtggtagacgaggaaattcattactactaaaaagatggaaattgtatgaacaaacgctttactttagtttaggtcatgccatttcctactccggaaatataacaagaaatatattgtttcaatttaatcactgaaataataaatttcaaaaggctcgtaaagggttcgggagatttacaaaataaacacactcacatgatcatgttcttgaactcacacgcatatatattcatgtgtaaatcgtaggtagtgaataagcaagaaaactaggatatagcggaagagagagatggagagagagagagagagagagagagagagagaaaattttcattcagcgttaactaacattttataatcaattttcttgtcattttatctgtacaaatgctttatgatatcttgtgtaaaatgggctttcaggacaagaacaaggtgcgcttacacacttgtatctcaattttaattatggttctttctcttgatattagaaaaagatgtatgatgaagaaaaagggttaattgctttgccggccgcaaacctatgaaagatatattaaaaaacaaagtcagttcattaccatgaacataacacatctcgggtagggaaatgcggttcagaagaacgtatccggtgcttaaaatttttctttggatgagaaaacttaggaattgattaagaaattaattctcaataggttgtgtatgaataaatttcaagtgttttcgggaagtaatatcgaagagaaatcattttatatgtaatcataagaaatcaaagagaaaagaatagtattcatgatccaaagtacacaccacaaaaaggagacggggacaaaacccatgaaaacggtgaattgtttgaactggtatcgttgatgatttgtccaagaaatcaacaaaattaaaaaaataaagaaaaaatactttgattttgagtgtttcacctttttccctaaagtaccaaccattcacgctgatgatgtgttcctctattctttctcttccaatgagcctattcacgatgatgtgcctcttttctttcttttccaagcctattgatcatagatgcaacactgcatatatatatccaaccatatctctcttcacttagtcacctatggagaaccttcgtggccttattgttataaaactttaaagaacataactcatggacagattgtgctggatttagtcttggatgatgctgtgttctttgatatgcttggaaggggaaagagagagagagagagagagagagagagagagagagaggatatatggtcttagttttgggatgtctttggcatatcattcagcagaagaattagagtcataagtttaagatattagagaggcttttatggtacgaaaggaaaagaaagaaagaaaggaaaagaaagaaagaaagaaaaaaaaaattgagaatcaacaatattcggacaggctacttgttctccttaaattgtaataaacctacataatggatacagatgttgctggtcccttttctacttaatttctacccttttctcctctaacccttttttctcttcgtcccctcttgacagttgtaaaaatcaatctacctctctgtctgtctctactctctaactagctagctcgtgattatcttaattgtttgacctgtgctagggactcatgcactttgatgttaattatgatatttgctctttattttttgtaattttattttatacctcacttttatgagtgaaaaaaaaatagaaaggaggggaatgtttatttatctcttttttcacgtgtacaaaattgtaaaatatgagtttagaaaatgtgatatatgaataatattaatactgttcgttttaattgaccatgctagctccatattcttaatataggtgcatgtatgttgtggaccccattctataatcaacctttcattttcttcccacctaaactaagactttgttcccatttcaataccactgtttttctgtcgtaataatgtgtgcattttctcagtcgcttctctcatatactatatttttaaaatatctcttcttttaataatataccatatgtttccactgacttctttgatctgtatgtttaacagtgacgtcttatttttggtatgctttgtagaatattagggattggacaaccttaattaatataaggctgtaatataataggggtgtgtggttttaaaaatatatagtcaattttggtgggaaatgtgcaaaaatataaataaacgacatgtataatttagtttttgaggcattttcaacggtaactggtggctaaatatgcatttcatgatttcataatagacaattgtaatttacttttctaattaagtgcatgcatgagctatatgactggaatcttgactctaactttgaagacttccattcatggaaatggagaggaaaagacaatataggtatttctcaatttactcaatattgaaataaggaagtccaaattaaagtccaaagtccaagcattatattataatcaaaataaattaatactgtaactgaacatagcaatagccgagtattttaaccattaagatctcactttttaaccaatatagtaatttacttctgttaagagaatctgtaggaaaaagaggatttgttagcaaaatatttgacaatcgggctttcttctaaaggaatctagaagctgggaggggacgttgaaatttatatcaactttattgacttctgatgcacccaactcttttaatttgttgaataccgcaaccatatatgtggtttaacttagtcatgtctttgtcaaccccagatattattactattaacaccaattttcctaatccaggttttttgttaaatgatgaaaattgctctaactttcaggtgatcacaacccgtcatcacgtacaactcaaaaactaaaaagtgacattgcgaattctggtttatctatcctctgacaagtaattaataatatataatacgtacatatatacacacatgaggcatacacacaaaaataaagagagtatgctatgttaaccttttttataacattatattttttcttttctttttcgtcatattaattatcttattatacacttataatatatactgtccttaattaattataagatttttaaaaaaattatttatccatttttataagatctttttttctaatttttagttgtattaattattattttttacatatttttatttaattattttttctccaaacattgatgagaaataattaattagatagacatataagaaaataataattttgaaatgataatacaaataattgatagatttaatgtaattaactaaattaacaacttttcttaagacacatgaattagttaaaagaatcttataattaaaaataaaaagaatatatatattatttttttaaaaaaagtgcaaatactatttgtcagtatatttggacccgatcaagtaattgtttcaatgttgtattgattgctcctattatatatcacgtgctccattttttatacatacatacattattttcttgagacactctttattattaactgagatttattaataaaagtatagaaatcacaagtaaaattcattagaaagtatgttgttatattaatagaaaaatcattttaactgagacactcttcatatatatttttcaataaatttcaattaatagaaaaattatttaaaaaaatatgttgttacgttttgtaaggcaacaaagtttaacatatagttgacagataagtgaggtcctcaaacatattatcgataaatgtttgattcttggtatcatatataaaaaatgttatatattttgtattgagagttacaattaaagtcatttcaataacctctacatttcaaaaaaaattaatcttcggtaataaattgagataaaaaaaactaagaaaaatacattatactattaattactcaccaaattcaatgcacaagtaatcgagggaggcaggtctgaagtttggtacatgaaaaaaaatgagggatggcagggtctgaaatccgaaaccaaacaaagaaaacatgtctctcccataagatgtgctgatcataagggcacaaattttggtcattttcccactttgggttgtttttgtcccaaaaggacaaagaggacctgtagattgggacaacgttggaatcagccgagaaattaggttttgctagatggcgccaaactccaaagctcgttttgcgtggcatgtgcatatatatatatatatatatatatatatatatatatatatatgtacatttcaagcccagtgctcgatcacagtgagagtgtgatagagagagagaagcatacagtgatgacagatattcgaagaattaaagaaaagggtttggcagagacaagattacgtggagaggaagggaaaataggagagcctatatcaatagagattaagaaatttaagagaatagagttggttttgtcctcacgtttgcatgagagttgacatttcaagatatattaattaaactgcataagaatcttttcaaagaattaggcgtatttttatattatttcatggatgacgacgtccaacctagcattacattattatacggacatacctcagcgatctacaactataaaatactacaagatattaagcatttcttgattgacccataaaggagaatcatgtcttataacaagcaccggaaaagagttttatatcaataattaataatgtccaaggtatactatcccctcttgtgcccttgtcctttcgtgatttggtaaaccttacttatctatatttttgttggtcttgacaaaaaatttaaagaaaaattttcaagcgtactgttgcgtaataattattatgaatataatgagtgagaaatcattatcaccacggattagtttaattttttactcttgggactcacgtaggatgttgcatgttgctgttagtatttaattgaaattgagaatccatcattgaacgagggataaatgtacggcctaagcaatatcattattatagtgctaaatttatagtttacaaatgatcaactgctgatcaatttggaaaccataagattggttaaagcacattacacacagtaactatacgtattttgaataaaagtttttttttttaattaacaagtgtagttatatggcactaattaaaaagttaattaaaaaatatcaattccttcaataatttatttattttttaatttttaatttttagccagtatccataaaaaaacttgttagacaatcctttgtattaattctaaatcaaatgattaattagattagtctttctgattaataatatttgaaattaataaataaatgaagaaagtaccagatattttttagatattatatatttttttattattattaaatattaggcgaaattatatatttcagaaaaatataaaaaagaactccattaatgttacattaatttacattggccagtttttttctccttaaaagcgtatgtgtttcaatagatccaactatagagttgctataattgtaagtaggagctgcaggcaagtaactacaactatggcgtccctcggtatttcaagcacatgtcaaaggaaaaaataggaagaaattaatatacacgaatttttatcaacgtaatctattatatatttacgtaaagtaatcagtctcatctcttttttatctaaatatataatcattatttaaaggaagccatcaataaaagtgaggtatgctttaacgtacgtgactcacgtcctccactttgagatcacgacccctccatgttcgttcgtatagctcgtgcaaacgttcattaaccaagggaggaagggattctgattgaggcacttcaagttggggctttcagaaactcttggttgcaggtttgattatgatgaaattgttacaaaaacagaatggggtgcaatgactcgtcattggatctcaagcatttaattgaaatagaattttctccttgatagcttttcaaaggctgtgtcaagaaaagaagactgatggagagggtgaataaaattaacgatctacaggacccacatggtatcataagcaaaaaaaattatcaaataacacttgccaattttcggtgggagcttccccgatgttggggttgggatgacataaagaagataaaaataaaattatcatttacttttttctttttatttattaaaagaatatttatttttaatctaaaccattgcagtattttaataataaatctaagggctaatattagtgtttcacccatggatcacttgataacttctccaccccaaaattcgcctattttctaaagaaaacgtgcatattattttttactaaaaaatagttggatttaaggtgcacaaggtccatataaagaatatgcctttaagattattaatattattgtggtggaatttattatttttaaatcatatatcacaaaaacatcttataaaataaaatggtgaagagtttactgatgttcaagcatgtgcatctcattttttttaatctttggaattcattcgcttaattagcctctctatatattttgcatgaataaattgttaattatatattgttatttctgaaaacgcatgaattatataggcatttataaatagagaggcttaattacttctctattttgcatttataagtaatatacatattaacaatctaaaggtttttttacacaattatttaattataaattattatatataaatttttttttacttttataatggttatcttaaaattcatatgaaaaataatttatgatctttgacattgtatctaggtaactgtccaaattatgggcgaactaggataaaatatttatgataaatggtcaatttcattctaaaaagtgtaaggtgataataatttaatttctgaaagaaaaaaattaatttaattcataaatgtataaaaagtatgataattatgttctatcattaagttttatgggaccatttagttattaagtcataatatttaataactattggatattaagttgtaattgttaaaaatttatttgtcattaaattgtaaagttcaaagactaatttaatattaaattatatgataaaatataagtgttacaatttttatatattcaaagaactaaatcagaacttaattttattcttttatagactaatttattaattatcactttacatttttagatcaaaagtaaccatttacccaaatatctatttccatctttctgatttgcattaacaaacaagtttttgaaaatctagatcatcaatttttggaaaagggaaagttataaacaacaatcactagtcttcagaataaaccagttattttcaaaataccaattagaaataaagttgagcttttcataaacacgcatctaaactttaattttcaaatatatatacatcaagacattcaaaaatataaaaaagtttctaatttattcataaagctaagacattagagcattctgagcaccagagtggactcaaaaaggtttgtagatagaaataaaattttaaaaagcacaattcaaatctgttatgttatttttctcacttaattacaactcctaattttgtatagcttgaatttgtaacacctatgtagaggcaaaacatttttggacccatcctattttctttcctatatagaaaaatcttaggatcgtaattagagatgctaattatactgattactaaaaaaattactttaaaaacaatgtttttttttatataacttgtgagttttatatccttcaaccaagtatcctaagtttcataaagacaagtgaaatccaccaattataaaaaattacgaaaatcacaatcgttatttttaaagtatgggaagtaggaacaaagattactttgattgaaaattgagggactaaaaagttaaaacatattttatcttataaattatttaaaacagttttttttttttcgaataacattgaagtaaaattttgaaagataattattcttaattttttatgatacaaggcacatgttatgttacaatggtcaagtacgagaagttgtatatgatgtacaattttttttaacccttaaattaatcttactcaaattattatggtgcatttcccgcacaaatataccatctcatctctttctcattccctcgtcctcttccatattcttctcgatctcccctccttctgatccctccgccgctgtccctctccactcaccacctcccttcgccctcattaatgcctactgcaacaacatttccccaattccatcacccttcatacaaacccttccgaccatcactcttcttctctgaacttcgagtttatgtcatcactcttcccacactgcactaatgccttcctcaattccatcatttgggaaagtggagatcgtgttcatcaatccgaagcacacgaacgacaccaatttgagggttttgcattaagtcattgtgtacaaaagcctaagttgattctgctgcctttttcgcttcccctccgcaagctctaccgcacagagatccagtgtgcttgttccctccccgttttgcgattcaactcctccctgattcacttcaacaagatcacacctgtgtgtggcactctgaggtttgcgagcaaagtcgacaacaccacgcatatcaccgaggtcgtcaccgtcgcactcgcctagagcatttcaattattaaaaagtttgattaagatccaaatgtttggagcattttttatgttgtatgttaattcaaatctgggtttttgttatgttgtatgtcatttttcgtcatattcgaattcatgatttggattttttctatgttgagcttgtgtttcaaatatgggtttttactatgttgtgcgataatccagatttgaatttcttgatatattgttcaaatttcttattcgttgaaatgcataaggggtttggtgaaaaaagggagaatgaatggaggaggcttggtgggtgatggtggtgcttgtggcaatagtcgttgtgattggagggaaatgacggtggtgggtggaggaaccgtcaaaaatcgcttctgatgacaacgtgcaagatagcattggggtacatgaaagagacctgaaggaggaatgatacactatgggaagtccaatttatcaaagattaattcaatagtaaaaaaaaaattgtgtaccctacacaaattcccatacttaaccactggagtccgtgccatgatacgaaaattagctgaaaaaagactagtgttttaaaaatgagatcgaacaaattagaccataacttttttatcatcagcaattagaccataactaagtttttcaccaaaaaaaagaccataacctagcttatatatggtatcatattggtattagtttaatggtttttaaaacattattagaataagatcgacacaactccctgagaggcataaatctatattaagaatttacatggatacgcttacattcaccaattaaagagagagtgctggcaacaataattgaatatcatgcatgaatttaaacttttttagtgatgacgtgtgttcgaccaactccttgactaaatttttcaaagaataattaattaacattgcccaatgtagctgtttatctttcttgatagaggaagaaactagtgtatgattaattaaacgagttttgattgctccataacatattaaagaacaaacaatttgacttaaataagaaatttatgcgtggcgtgaactgttacgaaacagtggttaaagaagaaattaattggaattgtgttcaaaacacgaaacgaaagatattactagtagacgatttaaatttcccgtcatttactgcaacagtataacaaattatttatagtattaatccaagtactcataaaatgttacaatgttacttatgctcttaaatataagaatatttttttccttttaaatatatatttttttaactaactttatcttattatcttatttaatgttattatttctaaaatatccttcatttaattgagatgttagttttaatgactttttttattcttgatacaaagttctaataaatgataagttgaaaaaaatatttttattaaaattgatgtaattaaatgtaattaattaactttcttaattagtataatgtatttttttctatcttatatttaagattagatggagtaataagtaagaagaagttgaagaagagatagaataaaggaaaataaaataaaattacatttagttgatccagtattctctcaaaaaccaatatcgaacggttttaccggtaaaatcaacttaagaaaaaaatgtttgaaatgtaaatattaaataaggttatttatttcagtactttcttggatataaatgaacccgcgagacagggagtgtgattctcatccccatttttaaatttgcctaggtggtattttactccatcccaacaagggtggaaaaaaaaaatctccaaccttggggtcctggcaattcccaccaagatcctcatattcaggggcaaattgttatcctacttgagactttgggtgtttttgctatacctactttgtcgatgagctaattgaaataggtagctaaaaatttaaatatggaaattaaaagtaaataaactaattgattaaattaacatgttataatttggccaaattaaattagttgaactagctggtcagggttaaaaaatataaaaatatatttaattaattgtcattttataactatatatgttttaaaataatgatcacttttaacattttaatttactttaaataacttctcatattagaaattaggataatagtttttttttacattttttatcaatttaaaatatacttattaaatgaaatgaaataaaaatattttttaaatcaaaatgaaataatataaatgaattattatgctattttttagaccttacaatttttcttcttcttattttcagttttttactagttttgttgattattaattctttatatttaatttatatttttatacctgttatcaatttatatttttaacattaaatatttaaaaaatcattttaaatgatttttaactgtaaaacaataagttaaataatattttcttatagttttacttgaaatataaaaaatattcatgaatttattacttttaatttttatatttatttatttttatataaatcaatactaaatgttccagaaacattaatttttgtacctatcattaaatattttaataatttgaatattgtattattttataatagaacacggaataatttagtttaatttcctgataggaacttacaagttatataagtaaattttaaaaataataattaataacgaaacttgctagtaatatctttcttatggaaactctcatgtaatttaaattttaagtaaagcataattaatatggaaagtttcaccatttcgtaaaatttattactaattaaattaagttattttaaaaattcgatatattatttttggtgcagaaaaattctattgaattaaaaggtcaaattttaaattactaaacagttaattaggcttgacctctctgagtaggtgtatgtcattaattaccgctatttaagtagtaccaatattattatgttagttcaagtaaaattaagtttgaattacttaaattaagtgaattggatagaaaaatataattaggatagaggatcctactaaaactgattattcatatttttaatagaaattaattattaacaaaatcaataaatatttcatacttattatatatatatatataaattagtttttctaaaggtttaactcccttaatttttccagtaaaaaaaagtcccttaaaagagcccgttatttgacaacaattctgaacttttttttttgtcagctggtgtctattaatctaattagaacaaggttgtagtctatatttaaatatatcttatcacaaaataaataaatttttaggtatgaagaaactttaagataaatttcaccactgcaataataaataaataaaaaaagaagatacattacacatgtggtataaatgacctatccaattacacctcttatgcattgtaattgtatatgaataataaatttacacatgtctcactcgttcccactcttaataatccgatcagtggtccaatgttgacaaaattattgtaatgggggtgtttagtaggaacagacagagtaaggataataatgaaaatgtgaaataagtaaacagtagcggtcccatattaacagaacatattggtaatggggtgcttactgcttagtaggaaatcgttgtgaaaaagacaaatatgtaccagctcagtggtcccattttcctactgatcaaaaagcataagaaccactaggtatgtcttaacaattagaaaccgcttgatttttgaagatttcattcattcttaaaccaaccttatatcttcagcttcattcacttctatatcaactaattgtaattaccgtttgacagataaccatgattcaagaaagccgatagagttgtcccataagagtttccaaagtccaaacacaatattgagtaccgaacaatcacataataattgagaaaagagaaaagaaaaaacaaaaataatatatattcctggttcattcaatgtgagctaaatccaacttttcattatactctctcatgaaatcgtataattatattcagattacaagaaattatataaacttagcccattcatatatattaaaggtacaatatgaaagatactcaacaaacaaaaaatatgtgcagtgacaatgcatacgtgtcaaagaggctaactcccaaaggcaaagggtattaatatattatttaccaataaatatatatatatatatatatatatatatatatatatgcaacgttaatttctatatatacaaagcagtatatatatgtccataatttctttagatggtaccacctaatagtctaatacagtaatactatttattattctatcatatacgtaggttattgtctggccagcttaatatagttaaaaacatgcatctgtatctggctctggcctttaaataactagcagcaaactgacagaagaagaaggagagttattgaagagctctgggtggtactaaaaattaattaatgtcagttatatgctctttccagtcagcttaattgcagaatgtgagtgtttgatttcctacaatgcatgctaagaatttaaagactttagcagtgtttacgaacacgtttcactcaacgcttaaccaaatactcactttgtttttatgatttgaaaaacattgtacgacaattcaaatttattttgcttaacaaacgaagttttatataaacgctactggtatttgagcatttaccaaaagaaaatttataataattcactgatcaatttctcttgtatcttatttttaactcatttttgttgtgtctcattttttcatcctattatttatcacatatattattttctctcttttttcttttcatttctctattcttttaatcctaattcattccaatttaggatgtatgataataaggacttttacctaaattaagaagtataaatttcttcttagtttgtaatatcttaacatgtccattttggttgtacgtaaaagaggcaatcttatgtatgagaatttatttcaaaggaaacaagaaatgtattaagaaattttttcctccttttttatttataacatttagtatcaaagtctaactatcttctcgaagtaagatagtaatatggcacttatggtcagggtatgtaatacgtggagactctgatatataatacatagtctaaggtaatgatattaaaaaaaattcatagtctaaggttgtactaattgtttggcccgagaacaagttaaattggttaaatgtcggctactaactaattagtaattaggatctcacattttcagctagctcaatagaaatgcataacggtgacaattacgaagaaatgtagtgtattcataaaaaatattatataacatgttggtactttttgtctttctgagataaaagttgtctcatgatttattaaataaataaaaataagtttttattgttatttatctatatttaagttgtgttacctatgtttttttatttataaaaatcaaacataaataattataattacatcgcctagtatataatttattttatcaaattaaatacatccttaacaattatctctatcaaacaaaatgcagcaaaatcaaatatcaacatacttgacgaaaatgaaatttaaggatttattttcagttcaaatattatttgtttttgcaccaactccacgtttgtatgatgcactcaagtcactttatgcgatgtccactaataaataccacactttaaagaaaaataaaatacagagatcatgaatggctatgatgttgctaaccttgccattttggtagccattgatgagaagtgatggtgacttactgactagctagggttagataaaactaagccagctaaaggcaatttgaatttgagcggtgggtattgcagtgtccccaataatttatttcgtcattgatggacaaggttagtacttgaattcgagggcggtacaacctttaggagaattcttcaaaacaaaattaaaggaattatttttattttatatattcaattgatatatttttattttatttctgcaccacctccacgtttgtatagtgtaatcaaatcactttatgccacatctactaataaataccatatataaaagaaaactatagagatcatcaatggcaatgatgctgcgcgctaattaatctcgccattggtaccaccattgatgagaagtgatggtaactaacagactagagttagataatactaagccagctaaaggcaaattgaatttgagttattgcactgtccccgataatttatttaggttgtgtttagtaaaatcagttaatatatactttgaaatttataagttagttgaatgtttataaattactactaggagttggaaggaaaagttacaaattagcttatttaattaaaaatatttatttgatgaaattaattgatgaatataaaatgacataacataatatattttgttatttgattatatatatatatatgaggaaaataattttaaaatatcacattataaaaaaaatgaagatttgattatttatattgatgagttaaggatacatattgtttaagatgcatgttgtggctttgtgagtgtgagaataaaagatgtgaaaatcaaatgtatgacataattgagagtgacaaggtaggaaagagtttccaaatttaaaaaaaataaaaataaagacaaaatcaaagtaaattagtgaggataaaaaaaagttagcagtttgagctaaaagtttgtttaagtaacttatgaaaataacaaggaatgaatttcgattcctaacttgatcatgaaattataattaaaaatattactttatcttaaaatgaatcaatttaacatgaaaaaaaaaaacataaaaataagctagcaacttactactaaaataaagcttactaaataagcttttggttctagtcaaatactgtataagtttataagttatctgagtgatttttaaatcgcgcactccttaggcaggtgtatttttcccaccagtttagagaagttaatatggagcggattggctagctggagagactcataacagggagttgggagctcattggagccttcaacctccgtatccttgcatttctttgctctggggtggtgaccttaccctgtaatactgtagtttttgtttcgggtttctcctttgctcgaaaaaaaaaaaaaaaaaaaagcacactcttgatcaattcttgaactcaaaacaggactacctaaggggaaaatcttttggaaaaggataattataattgtatatgcatttttcttgacaattaatgttctttttaaccactaaggttgacatagtggtagaggatttgaaagttagcatgaaatttgaagtttgaatttcatggttgttattgtaaaaaaaagatcaatatatatttttttgaaatattctttattattaattaaaactttttaaaaataatagaattgtgagttaaatacatttaacaataaatagaatctctaaaaaataaataatagaaatacattaaaaatgtgtattaacattttttttatttctttatatcactttctcatatttttgtaaccaccccaccccacgccaatgcaaataggatacacgtttaaggttattccttttgaaaactgaatagtatgacttttcctttcgcattatacatactacattactacataaaaggattacaacgaatcatttgacagcaccaaaaaactaatcataacagaatagaaacacataaaagaaacagaatacagaaaaactgtagaagcttcttcctcgtttcacggcaacaaactaacatcaccaacagtgaataaaatcccctctgtgcatgattccatggaggcagtaacttcagatcggactcttcactttgatcttacacagttctttcaatcaaatggttaggtcgtcaatgctattaaaagaattttcatcttttgggaatgacaatttcagggcaaagtatattcgtcattcctatagagcttcataaagacagcttttggtagtttttggaaaaaaggacctaaaccgtgctcaattgcattgacaggatccttattccttaccgtgtttctctaattcacgctatagattcgcaaaaccgtctctgttttgctgttcagttcactattcatctcaagagcatggcgtggtaaatacaaggtgcattttttttttttttcagatggcccaaaagtatgttcacaaagtaaaactgaagaagtatcttgttttagttttcagttgagcctatcgttaaaccaacttttctacaattttgtcttgaaattcaacttaaaataaaagtaaaaggagagttgtttttattaaaaacaagttaagaaaatagttttatatctcttttaaactctactttattgaagtaaaagagttgtgtgttttttatatattagaaagtagaaacaagttaagaaaatcgttttacatctattttaaactccactttccttttcctttttgagaaaacactatatatattaaaattattatagaatttaaattttatgaatagatgtatgattgatgaaaaaacatatttgggagaaaatgttagttacacatttaactaaagtttctttttcgtatcagattattttttatttattaaaagtcaatttgaataattttcataatatacgttttattttttatatgaattctaaaagtatgaaaactttggaaatgaatgagttgaaatgatattttattaatcttgaaaagattttaaattatactgagtatcatcatactaagatcttgatttattttaaaaatgagatatcatatgaaaattaaataaaagaaaattaaaggtatttcacatcccattaaaactatgaaagtataccaaacaaatatattcttcaaatacatgaattatttctaaaatattattgataatgcttgcaaccattgtcattgttgaaattaatgatttaaaattaaaattttgcaaatcttatttgagatattaaaaataattaataagaagattgtaagaaataattttacaatagataagaaaaaaaatattaattaaattttaaatataaattttgtttaaagtttagagacaagcctcaacaggaatagcatgatcaaaatgcaaccaatagcaacgacatttatgatttgaaatatggagaaggaattgatgattaagttgaacaatacaagtaaagttgaaatatgtatcttcctggttaggtggtcaattttacatagtcagacactaaactacgagtgcatttaattgtcatgccgtatattagtatatttttgttgatttgtctttactttagatcgtgacaagcaattccttagccattttaatttgaaatagtctttgggtcagaatgggtactgatttgctccatagtagaatctattatctaataatagactacattagtcatattattactattaaatgggggaattaacaagagattccattccaagttatttttttgttttgaaagaattccattccaaattaattatgatgatatcgtaaaaatattagtaacattttacatgcacctttaattaaatgaaaatgtaagaactttattaattacactatcccaatccatatttgtacacaaatgaaataataatagtgagcgagcagtaacaaaaaaaaaaaaaaaaaaaagcgcgtgcgagtaattcggaagtggtggccaatggggcctacaacgaattttaggaagaaaaaaaaaaaatatgagaagggggaattgtgtgtgtgggtggtggggggtgatgagagagaaactgagacaagagacaagagagacaaaagaaccccaacattgtaagattatgaaggtggtcggagaaaggtttctctgagatcctcctcttcacaaaggcagcaatttaacgtaacaacattatattcatttcaatcttttaatttgctgccttttttttcttcttctcactccttccttgtctcagtttaatccaccccccacccaacctgtcaccaccaactcattgcattgcatcgcatcatcaaatcaaacattgttgatccttcagtttcaacgcaaaaagggcttcttttcctgcacccttttctcccattcgcatggtaattcaattccctttttacccctttttgttttttgttttaacattgatgggaccaagaaagtttgcttgctcatgcggttattccttgtttcttcttttgttatggttttgatttgctgtcaactttatcattttcatttttattttttttatttgttggaataaaaacatttgtttattttttttttctctggatgtaatgtaatttcttacagccccagcccacattgtttggaatcatcattgagaggacgaattgagctgggtatgcttttgttgagcaaaaggttgtaaggaagagattgatacacaaaatgagggaccctgaaaccaagagcttcaattgtttttgctttccattgtaaagtataagttttgcatagttagtaaattttctgctgcttcatccaaataggtggaagggtttctatgtacagagaaaaccttccaattttgtaaatttgatatgacatatcatatagcttcctgactttaaagagatatagatattgtcgctaccaaagtgacattgccttctcatgccaatggaaagcatatgggggccatttggattatggctccgaatttatgttggattgatttctctgtggggaactcgacagtgttggtctctgaacgatgaaggtgatttgcatggattgtccttttagtctccctaatttacagtgaatcatgtaatgcatttcttgtatcttgatgtttgatttttgctgttgcatttggaatggacatagcaggattaaccttgttggaatttcggggaagaataacttctgatccttttgctgctctggcaaattggaatccaaacgattgcaacccttgcaaatggctgggtgtacgttgtgttgatagtcaagtgcaaacgctgtaagttccctttgatttcctctttttaaattttttatcgagatagtatttttttttaccaaacagtaatacatatagttgtccttgatgcttaaagaaagcttccattttggttgatgtgaatgcagttctaaattttatgtgcttatagaattttgtgccttcttgtagggtcctacctgatctatctttggaagggacattggctcctgagcttgggaaacttcgtcatctaaaatccctgtaagggttcttgattcatgtgtccgcctatcctcccccctttttttaccattatgtcaaaagtaaagcacatgttatgctggtgaaagctctgattaaacttgatcttataataatgtaacttaaatctaagagctcagcatttgtcacatagatgtcattcttaaatttagtaaataatcatgatatgcttgaaaaatgaactgctcatactaacatgtaccttgttacagttgtatcagtttcacattccttaatcacactatgccgcattcccttctgtctggaatgtagccatgaactcaggagaccaatagcagtaaataatgtctgtgtaaccaaacaaaaaaaatgatgcctttgtttgtgtgttatgatttttataattctttctttaccttttcaacatttcttttcttttcttctcccgtctatgcaatgttaatttgtaagcctgccttcctgcaatataacagttctctccccatcaaaaactctaaaagtagctatattctcaagtactcaactccaaagaattacagttagtttgctctcagctggattattatatcatgttagtgtccatgagggttccttgtctctgttggacagattatcatgagcccttctgtttggttattttagctcttgttatactataactcaatgttatacggtttgttaatatatgtctttaatgaaagactaaatatgggctaggaagttttaaaatccaatagttcagttgacttcatatagtaatttatattcaaatacatctctaattcagatttgctccctttgttactttgaaatagtgtactatacaagaacagtttttctggtaccattcccaaagaacttggaggtctagacaagctggagttattggatttaagggggaatgacttgactggatgtatcccagcagaaattgtcagggtgttgctgtcaaaacatttgtaagttaactctttttcttttttttttcttcttcatatatttagttatatttctgggttacctacaatcaaatttaattttttcctaggttggtttgtgacaataaatttgaaggcagtgattctcaagagctcagatttccctctaataacaatcatttaactactttggcaactttatctagtggcaagaatagaaagtttgcacacctgtaagtgtatcttcatttttttcctgacctagtgaccttatgctttccttcctttacctttacttatgtagtggcaagttaattagtcataagaactactgttgtcacaaattttattctttttgcaaacaatgaagtcttttggacaatcactggaaaattatttccacaaggtcaggcatcaagtcaaatatattccatgtagtcaactgcactcttcatgtgcctatacataatgatgtcattatttaattggtttaagatgttctattaatcaatctgagatctcatattgtcataaatgaaatacttaattttctgtttacatggggtttctgtatattgtcttaaatagatacaaatcttcattctgaatttctgatggcacttgttgatctgtttaaccttttctgcatcaacaccaatgcaatgtttattctttcttaactggaggtctatggaggtaaagataaattgaaatttgtttctgttttcagtttttagttaattgttttaactccttaaaacccagtttgtctttggttacacatttatagcagtagaagtcacactctatttatctatgattggctcttgtctaattgcatatgtgctgcgaagattaaaagttacctaaataacaattattaaaagcaatctgttcatcatttgtcatttgatagcccaatgactggtgaaaatccaaactgttgatcatttcattatgttcattgaaagtttgtggtgtacttcaaccatataaactcaaaagagactcgcagaatttcgtttgttcagtgtttgtttttccatttgattttcttttatctgatcaccatagttatttttttgttgttatatgaggaactgaaatttttgtgttgtcttatagctgtgctaaggtggtaagattagatttagcagtagcaaacttttagtagtaccatcctcttgagattgtatacttatcttaatatgctgcatcctttatggttaacaagaatggttgagtttctgattttttgacctttcgatgcatggtgtgaaaagtatacaacaacaagaacaacatggtgaaaaaaatatatgccataaaaatttcaagcaatggaacatggaagattcatttgttattccacttaaaggaacactcaaaaattacctcaaagctgtcattgctgtggcactgccactgtgtgtagataactttcttccccatatcaatcttaatatgtacatatattttcttctttcatcatgtttagcttactaacatagtctgctcttatttgaaggttcaagctaggaaaggctactccccatgcctatgaagagaaatactgtgacaatctgactagtaagtggagaaccttgattggtttatggcctgtgagaaattgatacttatgctcttaactgactttcaaaacacaccttccatcatgtaggctctgatgagtcagagtttggccagaatgtaccaaatctaatcaattcagcacgacgtaagttgcttgatcagtccagtaaccttgctgctgcacctttcagtggtgggcctactatggagatcagttctattccaattacccagagcagtggagctttcccagctgtgccagacagcaataagaaacaaaatcagtcacctgcaccattgccttcatcttctaattctccacctgtgaatcaagcaagtcaacaaaattcacctaatggtgcatctggaaaatcatggaagtatattattataatcgcaggtgttgctgtcttggtcattgtttttgtgatcatgctttgcatttggcgtaaacgagcagcaaaagtaataaagccttggaagacaggaataagtggacagttgcagaaagcatttataacaggtattatttcagtaaatgaataaattattgatattgaaaatgactctttaacataaataatgtttgtttaccaaattttaaacgcctcatactgacttccctcatatatgttctttagtctatagtaatttgattgattattttcatttgtttatgtaagttacaataagtccattacctttttttaaggtttggagagtctcctgttcaacttgttcaagcatcgtctttctaatttgaataacaacaattttatgaacgtatttcattattttatggtcagctaattgcaagaaaatggattctcttcttgttaggcaatatatatactatctaaagtgtcaacctatgaaacaattttgtctgagctctcttccttaagttattagctcaatccaaaattcctgcggtgttttgtccttgtatgtaatgtaggggtccccaagttgaatcagggagagctggaaacagcctgtgaagatttcagcaatattattaatagttttgatgagtgcaccatatacaaaggaacactatccagtggagtcgagattgctgttgattcaactattgttacttctgcccatgattggtcaaagaacatggagacagcctatcgcaaaaaggttttctccttttcaagtcaatggaaaggaaaaagttgaattagaagtcccaattcaattgagagggactgtcgattcttaattacctgttgctaattttgttccttgtatgcttcagattgctgaattgtcccgtgttaaccataagaattttaccaatcttattgggtactgtgacgaagaagaaccattcacaaggatgatggtgtttgagtatgctccgaatggaaacttattcgagcatctgcatggtaacaacgtccatctctatctaaaggctcaagttattaccttgtgcatagcaaatccgattaaagggttaagttctcttcgtaaaaaacaacgtgctgaatttgtgtatatttgctctcttttcagttaaggaagttgaacctcttgactggagcgcaaggatgagggttattatgggcgtggcttattgtcttcagtatatgcaccatgatctaaatccaccagtagctcattccaacctcaattcaattgctatattattaacagatgactatgctgctaaggtatacacctttctattttttgtttttaatgtgtgttaggtaacaagtaacatatctccattctattgctctcagatatcagagatctctttcggcaagcatgcaaaaaccaacacaactggagatgaatcacagaaatcttctgagttgccaccccaggctgatcctgaaactgatgtctataactttggagtattgttgcttgaaatcatttctgggaaactaccttactctgaagaacaaggtcacctttccaactgggtaagtttgaaatttgtgcccgttactttgtttttctttcctttgaaagtacccttccttgtactttcaagtgcaactccattgttctatgtcacttaaacaaaaaaatcctgatcaacttcctaggctgctgagcacttgaatgataagcgaagcatcggctatctgatcgatcccacgctgcagtccttcaaagatgaagaacttgatgtcatctgtgaggtgatcaaagattgtcttcaatctgatccaaggttaagacctacaatgaaggacataactcccagattgagggaagtgcttcatatatcacccgagcaagctgtcccaagactctctccactctggtgggctgaactggagatcttatcagtggaggccacttaaaaagttctatctaactctcttctgtgtattctaagtcaagtctctctctaacctttaccgtgctggaagagtacagctttctgataatgctatatggtatttgctactcaaattctttaattctatttgttctttcgtaagtccatataatcaaaataccatagctattattgtcccagtggaagcgtgttatgtaattttgcaagtggggtgttgtaaattgtacttttgttgatgaatattgggatgtaaaaaagtcttgacaaattaattggtatttcagtcccaatgaacatgcaacttctatacgggtctattcaattattattaatgaaacttttaagttgtgactgttccccgattaagatagtctaccaattccagaacaaacaggtaggcatttttcaaaagggaggcagaatagttgaaaaaacacaacataaacaacgacaactgagctttatttgattccacaattaagtaatatgcatcaaactacgtgattagattattcggctgcaccagctatatgcatttaattgactaaattgtttaatagtcaacaaaaaccacttttagtatgacaaacacttattgaactatcagtttcaccacttacagtgcaacttggcttatgttcaaatatttagttcggtttatagagatattttgcacacccttggcagtatatagaccattcatttcactttattactttaaaagatatattttttggtacaggtaggaaaaacaaaaacaaacaacatttgtaagttactttaaatatctttaaagatatttagtattgtcacttgtcagactgccatttcaccccttatcttatttgcaatggatgcaatcgatatatctttgatgtcgaaactttatttcttaatgtgacacatttcttttttaacttttggctacatacgtttacctttttcatatttgtgccacatattcaaaatctgtatactttagctgctgatttcccattcaataaccatagttagttcactctagagggaaaatgtatacgagcacaagattgggttgccgccaagtgcttctgattagtgtggaggatgtttttattattttttatatgtaaaaatcaaaacagaaatgtcaataaatttataataatttatatattctatttaatcaattaagctagattctattaacaaaacattttcatttatgattttgattaaggtatgcacaaaaatagtgatgacgctttagagattaattgtgagtcagcaaatcatgcgaggacgcggatttgatgatgtacgttaatttatctcctcatatgatctctccaatttcattacttcattttggtaatctctccaatgttgttttccccacactttactctacaatcacctaagtcagatgctaccctcacgtaatcatgtggcctcgaaaagtctttcaactcaaggcacatgatgggaaaaaatttgaactattaaaacgcaaactcgttcattatgaaataaccacaaatcagaataaagaaaatggtaaaaaaaataaaaataaaacaaaatccgcaaatttatcaaataatcataaacctaaaaaatttcctaaacacctcttttaactaataaataaaaaatggtcagtctaataaataactaaataagcccaaatattatagaacctctgtattcactattacggaagcttttagaaaaacatccatgcaatttatttaaacttaaacagaaatggattatgatttgtcaaacgttttttagtttatttttataattctttgctaaaacatatctaaataagttttttaatcttatttcaaaaaattataatcaaatttataacataaactcacatataatgaattttttttcctgaatgcacatatataatgaaagtttaggaaataaatatttaattaaggtcatatcgtcaagttattttagttattttttagttatttttattaattaatttttttttactattaggtacataattttttttagtagcttcagttatgctcaacaaaataattaataattgaaaactaaaagctaaaaaattaacttattaaattataagtattcgataaaattaggtgttgaagtaactaaaaaatgtaaaatgatagaaaaataataaaatcatgatttatttaaaaatgataattaagaaattagataaatatattgaagataaaaatgaaagaaaatataaaaaaaaatataagttagaagctagtattttaaaatactcaagaagttactaaaaggtttttaccaaacaatcaaacaactttctcaactaataaaaaagttaaaagttaattgaaatgtcttatcaaatatattttttaacattttttaaaatggagttgaagtagttaatcattataactttttatattttcttccatttttattctcaatatatttatccaattttttaattatccttattaaataaattataattttattatttttctactattttatattcaattacttcaataattaattttatcaaatacttatgatataataagctatttttaaactttcaactatcatctatttgtttttttaacttttaactagcttttcaactttcacttaatttttcaattaattttatcaaatataacctaaattatttatacaaacatctcatagttcgattttcaaatgaaaagaaatgacggcaatagaaacctactgtaaatatgttccattcaaaacattttccattatgaacttaaagagtttaattttcatgtgatgttggtgtaatgaatcttatacaatggtttttaattttttttgtttttttaaattaattgttataatgattaactaaatttttaatacataacagcatgtaacggatgataatgtaaatgttttatcctattaatacattctaattaaattttaaatataaattatggattacctacaggtcacatcatttatttgatgagtgtatttttttatttagtacaatttataaaaatttcataaaagtatattaaaaaatgtatgatatatttttattatcatttctaaatatcctctagaaaagtatttataaaaaaattatttataaatcatgtctatggataagatatattcatgacatgaatcatatatcaaattggaatattataaagagacatgtgatatattttttgtatttatatctttttatcatattatttattttattcaaactcatctaatatcatattatttattttattcaaactcctctaatttttctctctcttagttataaaatttgttattcaagtatatatcatttctgatagtgtgccggtcaaagagtcttgtgtataattaaagtagtgtttgatagctgaataataataatgaaaaatgtagtgtttgataggtgtgctcgaaggagacgaaatatagaattgttcaccctaataataaaaaataaaaataaaaaagtattcaaataatataaccaaaaaattatttacactaataacataaatcattatttaaggtaagaagtcgcactttttgtttttttttttttttcatttttacgctgaaattgattctccaaaaatcaattccatgtgttatttttttttatcatgcatgatagaggatatttgatataaatattgtattgtgcactataaataatgttttctacaagaaaatttgactaaacactaattttaaatttataacaaagtataatttatctcaaagagtacttaaacaaaatgcacataattaaatactcaatataaatataaatggtacaaattatacaaattatagtgtaaggtgagaaatatattcaattcttcattttgacattgtgaatcaatttcacaatgtattattttttttttaaatgaccttattaagtcgattttatggaaaattcatgtcgtaagactttgttttaaaaaaaatacagttcagaatgtgtttttttttgttacatatttcagttttgtttttttttttgtaaaaaatagttttatatatttttaaaaaataaatgtttttttaaattattttctattttgtttgttacagtttttttaagttcgttgaagaaaaaaaataccttgtgaaatcgtatcgtgcacgatatagtagtgtccacttgcattttagtgacaaaactagaaagaacttattgtagtagagacaagataatatctcttaatataaaaacttaacatgatgaaaaaaaaaattaaaaatagcaaggcttaaattagaggagtaaaataagaaggattagtagggtggttcaaactcgtctaataaaatataagacttgagttttgaatatgaattgtatatagattcttttagcttaacctaatgatgaccggatctaagcttagtttttttataaaaaaaaaacttgagaaaatcaaatttgtgcttcacttttaaaactaaaaataatatttttttatccaaccattataatctgccacctacatcgagcaagtaacatattttgtctcttctaatttaaatgacaacttcaaatatagaattgaaaatcttaaaatgagtccgggcatgttgtttatgttcaacttgcatctatttgtaggactggacattggacatttgtaagtagtccaaccaattatagatgtcttattaatccatttcctcttcacagcaaacactagctatgtgtgttatgaagtaatggatatctaaaaaagtgaaatcaaatatattttttttaattcggtatcctctacaaaagttaagaattaatcctttaagatattaaaatttatttaaggaattgatctcatttaatatatgtttataaacctataatcatatataaaagataaaattatataccaatcatatcacattatattactaatcaatattctttattcaaatataacttttatttaaaaagaaaatactatctgtgattcaaatccgcactaataagtaaaaaatgtgtttgatattatttcctagggaaatcaatttaaaaatacaaaacactcctatcatgcatctttttcagccttccacttcccaggttggttttgaatatataaaatcagcagctacagcagaaaggtggacatgaaaaagtttttgaacagccaaataggttccaacagtcggttccattagccacaagggcccctacaatttgaattatttgaaaccactggctctctgtttttggaccacagaaagaaacaagcattggaattggtgaaggatgagttagaagacaagtagacaagcgctcaatctagttcaacaccaggcttcattgcatcagcacaaagtaccaaatgatccagaaaccatagattagtgatggcatgtacataacgtaaaacatgtgtgtattttctaacaagtcaattttcacttaaaaagtctcttcatgaaataataactaagtttcttaagagtttataatttataatttgtagacataacacctatgcattgctatgtttagtaaatacgacggttccttaggcaccacttgtaagtgtgtagggccacgctacaatcaaacttatggtgtctgttttgctgaagcattttgggtcaaataataggcaccacttgtatgtgtaggcccggtgtgaaagcaacaagcttattttttggatataggagggattttcagggcatttatcattcatttgatcaatgctctacaatgctttcagaattgagtgaatctcatctatgttgataaatccggcatatttctcccattttctctactctggcatatgagtatttgcttttcactttgttccattgtttaaaatataatatcaacaagaaatgcgctggaaatcagcatgattcaggggaaaatagatcacttattttaaacgagaaacagtgaaggaaatcttctttatttaatagtataagccataaggctttcatttccctttacaccgatatgaaatcttgacctgatttggttacatatactaggacgggttgttgttgttatgacattctgattcctctctttagcctatgtttggtataggagaaagagagtggaaaggaaaaaaaaattaaaatttgaattaaaaaaaaaataaaaaaaagaaaattttaaatttttatttttataaatcaattttttttctttttttatttattttctcttcattcaaataaaagaaattatattgttcgtgttttcctttcactttgttttctttccttcttaccaaatatagcattagagtgaattcccacaatctcattccaaattaaggtgatgaatatatggagttaatatgaagcactagacacccaaatccagtgcaatacctcacggaatcacaagaaagttgcattattattttctcattacttgcaataaagaaagaaaataaatacagttacagagcaatttaccaagacatgaaaactgtgaactgtgaacatgtacacttcattcactatatttaaattaaattagccttacagaaatacaacatttggacatacaaagacagtagcatctaatgctccagtcaaggagcaaacctaacaatgccggaaaattcttgagggaaaaagaaagtaaaatttaacttacacacagcctaaaataacaagagagaattagtatgctatcatcttctgtcattctcctgctaccttaattaatgcaagcattcattgtcttttttggtttccgatatgtttcgttctttggaaacaattatagagcccaagacatgatcagatagtaaacatggccatattttcctgttgacattctaactttgattcaccatgttgcgagatactagtctcgtctgctagacccaactctggttcgtataaacattcattatctgaatgtctgttaagtgcagagtcagaaagtgttcgatgttgttggagttcagattgaatgtgtgtagattgatgacaagaagaagaagaagcagattcctccatccccaaattctccaacgcgggtctcaactcagagttacaaaacttgtcatactcggccttatcccctccctttttcttgacctccaccactaccaaggaaggtgtcaactcaaaaacctcagcagcaatagtcaaaggccccttcacaccttctctacacccctccaagctcaccctgcaatctttcttcctcacagtgaaactaaccaactgagcaacctcctccaatttcgatataatcttcgacaccggagcagatgacacaaacctcgcctcatcacccttttcctcaaacaaccctgatagatcaaagccctgagaaaacgatatgatgtcaaacgcattcaaactcgcaggcctcggcagcgcaccattactactattactattaatattcttcctcctaatctcaacctcagaatccgaggttgccaaatcatcatcatgatgaagtaactgtttctcatcaaaactacaaactctatcatcttccacataaaacttaatctgcttgaaacccttcttgaaccagcgattctccatgacttcaggaatagaaattcttgtctgagggttagtatcaagaagcctagagagaagtcttgtaagttcagaagaaaaccacctgggacaccgaaactcacccttgtaaatcttcttatacatagccataacgttacggtcatggaagggcaaatagccggccatcagaacaaacaaaacaaccccacaagaccaaatatcaacctttgcaccatcgtagcctttccgcgccaagacctcaggagcaacatacgcaggtgtcccacaaaacgtgtggaacagcccgtcctgccttatctgatccgacacggcactgagaccaaagtcggagactttaaggttcccatcctcgtccagcaacaggttctcgggcttcaggtcccggtggaacacgccgcgcgcgtggcaaaactccaccgcggaaactaactgctgaaagtactttctcgcaacttcttcttttaatcttccctttgcgaccttgttgaagagttcgccgccacgcacgtactccatgacgaagtagatcttggtcttggtggccatcacttcgaagagttgcacgatgttggggtggcgcacgcgccggagaatggagatctcgcgctttatgtgggagaccaaacccccctttaggattttctccttgttgatgatcttgatggcgactccttctccggttttgatgttgcgcgcgtggtggaccttcgcgaaggttccgtgcccgaggagcttcccgagctcgaaccgccccaggagaaggttcgggttttccttcttcggcggcggcgccacctcttccatggtggtgctggtgatatcgattgatcctgtgagataaaaacagtggaagtgttcgctagtggtgatggagcttcattggagttctgaagctatggaattggtgggtgtggtttctattattaaattgtttcatttgatgatactgttgtattgtgtgtaggaaaattaaagtaaataaaataattcattcatattcatggatttactattgaaagtgtggattttttttttactgaaatgattaattatttaaattttaaaataattaatcattttaaatattaaaataattaatcattttaatcatgattattttaaattaattattatacttatatttagtatttcgttaaaatttaaatattaacaggatattatcttgatgtttttaatggaaaaaaaagaatcaaattaaaaattttaaaaatatataaaatcaaaataaattttaaaaatttaatgtaatgaaatgaaccatttaatttatattattttttctttaaattaacattaaaaatttaatgtaattaagtttttttatttatcttttatctcttttattaagtttaaattaacattatagatttttttataacacaattagcaatttaggtagtgaataattattttcttattcgaaatgattatttttatgcagaagatttttgctatttgtagaaaaaataaatgattttccatctattttagtatttgttatttttggtaggtgtgctgattatttgtttgtgacgtagttacttaatcattgactctggcaacggacacagtgcaggtgcagcggatgtttcttagtactttttcttttctttgtttttatgagtaaataaattattacgtttagaggacaccaccaaccgtgccttaccatttcacttgtgtttaattataacaatgtattgtctgcttctaagtacatatatggtactacaaaatattacttatgaataattctatattgctgatgtagtaaatgttttattgaataaagagttttaattttaaatttaggtccacgataatagaatgtaatgataatgtattgttgagttaggaaaacaaccagcggaatttaattatttaaattttgtggcattaaatttataagattcgctaatgattagtggttcaagaaaatgtccccactatagtattttattaatagaatttaatcatgctaataaaaatatatttcaatttatttaaaataataataataattttcaatttaattttaatataatatcggtatgaaacttttttatattaatttgttatgttatagtaaacattaatactttaatcaataaatttaactataaaagaattttgatattgtcaattagtcaaaaaagttatcattagagtaagtttattgacttctataaacttactataaaataagtgtaactataaaggttactttttatataaaagaaaaaaaaaacatatttattatgattctttacttgttaatagtttaaaaattcattacattgttaccaatatatagaaatgaaactcaaattttgtcgatataaaaagataaaattattcataaagtatggattctttcctggctgctttaaaacttaaaaaaagtatatacatgtcttttttaattaaggggggttttatcatgtaattaaccatatagttgatattttataataaaaaaaactatatacttgatatatttaattaagtatcttgtaattttttaaacaaaatcaacatacaaatatatgaaagataaagtatgtggctgtaattttcaaacgagaagattttttatactacaaacgctaattgttccatttccatagacattatgatgacatcttactttttgtacaagaaatttttcgtatgattgtttttttttttgtttgttaaaatacattttctttgtccttgcaatgttccatccataattttgatcttccgtttctaaatcgagaagaaaattaaacactaaatcagtaggaaacttgctttcgttgtttcatattgtaaacattattattatttttttcgaattatacaaatttataaattaggtaaatttgtttaatatataaatcattttaatttattttatttatttttacatatttacaaattaaactatttacccaataaactaataagtaacaatcatttatctattatttgttaaacaaggggttagattattttggtgatgaacaacaagggcttagattgtacgagtacgagataaatattatttatggttttcaggattattatggggtcccttaatttaaagtggaatcatcatcattcttcatggccatgtgcccatgtgcctccttttcctctccaaagtgcctccgaaaactacttgaactctttcaccgtcattagtgctccaaacctcactgtctcataacgacttcaacccaataactcacaactcacaacgtaaagagagacaaaccaaaattgatgtttttgggtgtggtagcaacgaatgaatttggactgccatacggggtgtaggaagcaacgccctaaaaattatgatatattgttttgttgggccgaaaggcccatttaaaaggataatatcatttaaatggagggggagaggagaggtgccccatgggccatgatacataaacaaaatacaaactcttcgtcagaagaatatttagaagatacgcagtccagtgaaaagaagatgaagggattattagtgtctttgagtagatgttgataaagtaagcatgttctgtttcagttactggttattaagagttttattatgatatgttttatttaattttgtgtttcatttttcttttctttttctagccaaattaccttcgtggcgcattttattgtgttaaattttcattttgtttcattaaaaaaaatcatttttgttagtgttcattcggtgattttgttgatgtagtcatgttcccattattttatactcagaaatttgctaaatttgatgtcatagtttttgttatctcacaagaaaaaatttctcattaaggatcggtttgtttcagattataaaagaagtaatttttgggtgaactaaggtatttcttgattgaaagacaataactaatctccttagatattgaaatccatttaaagatttaatctcttccaacatatgtttaaaatagtttatgattataataatatttctaattccttttaacttgttttgaaaatttgtaacaaatacagtgtttttttttaaaaaagaagtgattctttaaaattttaaacaaatgagccctaaaaaattggtgtttccttacttaattttatactctttattaaaactgttggtatcggtattgattgtgttaagttgctattggcctagttctcacaagtcacaagtaaagaaacatttttgggttgttttacattctgatggcttttatatttacttaaataagttggttagttagacttaatttttttttaatgacaaaatttaactttcctatttgattaaataatttaattttctttttggctaaatttattttgtaaaaaaccctaatctaatgttggcttaatataaattaagctataaattccagtcgagcaacttcacctatttctatagtattttgattgaagtaacttataagttactagactgacatatccaacacactcatatataactgtttctaaacttagtttcgataattttttatcaaaatattaataattaaaaataattttacattgcgattaaaattatgattattataaatttaaaatataatttatacatttaaaatatttatttatcataaattttaattatatataaatttatatattaaaaatatttgtttattttaaatagacagagaggagagcagaggcagtgttggctaagacaatggtgtaacgaaaagctttggagggtacgatgaacatgacatgaaatgaaagtataggataaaagtaatacactcacagttcctctaaaaatattttttgaagaaaaaattaagaaaaaatgaaataaagttttctataaattaaaataaatttttcgttaattcatttataaatgtcatcttatattttagagaaattatattagtaaatttttaaaaattaattaataaaaaatttatttttatttataaaaaaattcttcacattttttcctttttatttttttttttaaaaatacttgcaaagctgaagcaaaaaccaaagaaagaaacacataactttattaatgcaaccttatccgagcaatgtgcttttgtgatatgagaagcttcaaggagaagactacgagaaactctctgatctcatttgattgtgatatttccaaattcggaatagaaaattaattgaagaaaaggagcttaattagttcttttcggacatgtgtaaataaacctcatacaaacattagaagaaaattagagataaaatgaattattttttattaaaaattaatttttatattttaatttttatatatgtataaattgattttaatttatgaaaaaaagttgttgtgttttcttaaatattatctgaacaaaatattagttttattttgttttatttcttactcgtttggttcctacctaccacatttccataccacaaggtacacgttctttatttgttgttacctgctgcaatttttttatttcttattttatttatgacatttacttgataagtcttacgtattggatatgcatgtgggtagttcatcaaatcaaactattagagtgaagattttgtaaaattaaaatgctaatatacattgaaagaaagaaaaattgcattttaagttgttgcagccttgcaggtcccattgcgtcttttcccaaacctccaactaaaataacaaatagcagatgcaggtgcaaagcttatcaacaaaacacgttacgctgatgaggcgatgttcctaatttgaaaaatatcctatttcacgaaccaaaataatacaattttaataaaaaattatcaatttaaaattatttataaactatttatcaatatgagattgtttctaaactatgtacgaatctggaccggtcacgcccaattttggacgcgacccaccagatggcgatatatgtcatgacatatggagcgatacatatataaacttcgaacggtcataacttttgattggaatgtccaattgagacgtagtttgtgtcaaaacgctcgaaattgagagaagtcctgggcaagtccctaaacttggtcaaaaattttccccaaaagaggcctctaagtgtctcaaaattgcgatttaatcttcgaagttccaaaaaaaattttgtttataattttttaattattttgtcagttaattgcctgctattttttacttttttattgtctctcttaatttcgagcattttgacatatcgtacacctcaatcggacattgacacctcgataggacatatcttagagcatttgatgaaaatgtctgatcgaggtgtacgataggtcatttgatcgaaattaagagagacaataaaaaaaataaaaaatagcatgcaattaactaacaaaataattaaaaaattagaaaaacaagaaattttttgggacttcgaagattgaatcgcaattttgaggcacttagaggcctcttttggagaacatttttgaacaagtcacctttaggaacttgctcaggggttctcctctcaatttcaagcattttgacacaaactacacctcaatcgaacattccagtcaaaagttatgatcgttcaaagtttatatacgcattactccatttgtcatgacacgtgttgctatctagtgggtcgcgctcaaaattgggcgtgaccggtcacacccagattcaagcgggactggtcacacccaattttgagcgcgacctactattccaaattcgtaaataatttacaaacagtctcaaattaatattttttttattaatattgtattatttgaattcttttagcccctaattcacatcaaattattggacaaaacaaataaacatttcaaaatattctagtactaaaagtcattatcattatttttttttaatatgaaaaaaaaagacactcgcataacgcgtggattgattaaatatagttatatataggtagctatagtatggtaccgtttctgatgtagtagaccgggcaggaccgctgcagaattatattttttacaagagaagaaatcgtattttaacagttttagaataatttgtttaaaagtttaagtagataaaatttgttttttaaaaatatttttattaaaaacaatttaagtaacacataaaaagaaaattatttcttattttatcaataaagcttttttttaaataagcttaaataaacggacctaaactgaatttgctataaccaacaatcatttgcactttcaagtttcaaataaccgaagcctctcctcaattacggttgtttgtaggagtgacatagagaaaaaaaagagaagagggaaagaaaataaatgattgataaaaaagatagtgtgcttagtagagtgaaattaaagaatgaaagaaataaaaacgtggtctctgcaaattggcgcaaaaattgtgcaataaacctgttttcagtgattatcaatgattcagaattgataatgaacatttttttatacatgaaatcatttgttctccgttgctagttgattacgaatggtttcataatcaattatcaattttttcataataatttatcagtgtttcataattgattatttaactttaaaattttaaaaaaatgttttacttctgttttccttatttctttttcttatcttcaatcgaatgtctttatttaatttcattctatttctctcatctagtttattcattttatttgtcacctaatttttttcttgttaccagacacattgtaaacattgtatacattagacagatagactacacatttaaaaaaaagtaaaaaaataattaaatatgatagaattatgatttatgataaaatagatagagatagataaaaataataatattgataatagatttaaaataaagaataaattatgtattatttctcgtaaaaaaaaatgtggaagcaataattgccggcttcagtcaagatgtgatttttacgtcaaattaaatgtctctttgaaatggttttcaaacaagctgtaaccactatatatatgaattgtgcaaagaccttcttaacaagcaaacatatcgtaaaaactttcaccgagttatggctttccttgtgtttcttctcttctccctcttaggtttctcttctagttccagaatatcaactcatcgttccatattggaccttgacctaactaagttcaccacacagaaacaggtgacttcactgttccaactatggaagagtgagcacggacgggtctaccataaccaagaagaagaggcaaagagacttgagattttcaagaataacttgaactatatcagggacgtgaatgcaaacagaaaatcaccccactctcatcgtttggggttgaacaagtttgctgacatcactcctcaagagttcagcaaaaagtacttgcaagacaccaaggatgtgtcgcagcaaatcaacatggccaacacgaaaatgaagaagaaacagcattcttgtgaccatccgcctgcttcctgggattggagggaaaagggtgtcatcacagaagtaaagtaccaaggggactgtggtatgtgatgcatgttactattttttttattgattaatattaatttattagaatgttagttttgttaaagaagattgaactcacaaactatacggtatgtgatgcatgttattatgttagtaataattagctagtaaagcctatagaaactgttcaaaaggttgacttatataaggaatcgtgggatctatgcttattttcaatactaatcaacttcttttttatttggaaatgacttgtggagtgtgacacgattttgatacataggaaatggttgggcattttctgccacgggagccattgaagcaaaaaatgcaatagtgacaggaaaccttgttagcctttctgaacaagaaatcacagattgtgtctataaagccaacagttgtaacggtggataccactttcatgcatttgaatgggttatagaaaatggtgggattgccactgaagttgattatccttacacagctgaagatcatggtacatgcaaagccaataaggtatctgttaccttcttttgacaacttagcttgtgtatatataacccattaattactcttgcctttcatctttttgtttaatttgtgcacaccttttctggaagtagacacaaaacaaagtcacaattgacaattttggaggtctaataatatcaaatcatagtacacaaccagagacagacaatgcactgttgcgcgccacccttgagcaacctattagtgtggccatggacgcaagagattttcatttctacactggtgtaagtaattactatattatatcttaaatagttggggattattattattattattattattattgttgttgttgttgttgttgttgttgttgttgttatttttattcattgatttgtgcagggaatttatgatggaggaaactgttcaagtacgtatgggattaaccactttgttttaattgtgggttatggttcaatagatggtgtggattattggatagtaaaaaattcatttggaaaagattggggaatggatggatacatttggattcaaagaaatatcagtaacccaattggagtatgtgcgattaattttttcgtttcttggcccatcaaagagaaatcagaaacactggtgtctgctcgcgttaaagctgatcaaagagtggattactcttctctttgaaccgtgaaggtggtccaattaattaagtagctagtgcttgttttcttagagacaagcatcgcatgtatgattctgcgtgtgatcacgagtcttccatgctgtattaatgtgagaagacaaaaataaaatacgcaactgatttttcttcaaataatgtgaaagtcaataatagaacactgccactgttgcatgtgttttgagatatcctctgggcttcatgcctttctctttaccatatatgtttcatcgttcataggttctccagtgtatttccttttactcgactacgtgaaaggaatattaccgtttttttttctccactgggtagagtcgaaggggtttatttgtttgaaagatggcacgtacccaattaataatatcacaactacacaactacacatataaaagcatcaagacaccaatgagtcaagattaatatatatgttcgacggcaactatgtgtgtatgaagtttaggtaattaaacatatttactgtacgacctttttttaaggaagaaaagaaataggtgactgagtcgatgaaaataataaatgaaaatgtgataaataaaatacaaataaaaatatttaatttaagagaaattaaaaagaaataggtgattctcgatcacaatatggtctctattaatgtcaacaagacatgttattggtgatgaaattttgcacttatatttattaataaatataatctcgtagatatttaatgaaggaaacctttactcttttaatttggaggccttttaatttatccttgtttatagatcctctgtcatgagtttagtggttttgatcgtgatttaacactcacaaattacaaatatttattaatatacttctattttttctcatctctctttctattttattatatcatgaatcgaattaataactttatttccaaagagtgtttaataatcatttttcttcgaaaagtatacttcacatctatgacaataaatatttcaaaatattaaagtactaaaagagtttttatttattattaatataataaaaacactcgactacatagtgtgtgaattactgtttaatttaaatatagttatatatagggatgataaaatgaatcagatcaaaataatttattaattcattttgatctattaaaaatttatttaaatttttgtttcaatccaatccatttaacaaaaatttatctaattcattcattaaaaattatttcatggatgatccatccataaaaattataaatttaaataaaaagaggagagtaattaacttctgcataactgaatttataaaagttttttatataacttctctaaaaaaaaatatttgtaatttatgcatctatataagctaattttagtgtattaccttttttttctctctcttatttttttttctttatggaagcttattcaaataaacataattatggttgtatactgaggctaaaatttgaaaaaatattttgtatggaatgttccacagacgacataggacttcttctatgaaggtaggacaaaaatacgggcttttcattgttcgagaatcccctgcagtagaagaggtggcatgccatagtttaagaaggggacagagatcctaactagggctattcttagtggactagtcttttgcttttctccttttctagttgtggggcttaaggaggaaagatgtcaccgggcaggggaacgaaatctaatagtttggctgttgtgcgtacgaaacttgctttcaagcttgaaacttcttgtccatccatctggctttaaacataggatttgcgggacatcaaattaactaaagaaataaacatttcaaattatacaagcattaattgtataaaacagataagaatacacgtttaacttcaattgaatgtttttaaaaggggtaatataatacaagttgataatttacagaaatttcatttcacactagccttacagaaagaaacaaatcttaaagaaagaaagcaaactacaaatttgtaactcacaataatcaaaagaatacaaagttttaattagaaaaatattgttatttggtcaataaatctagaaaacagatacgtttaatatcaattgaatgtttttgaaaagagtacatacaagttgataattttatagaaatttcctttcgtattagtacgaaacttacagaaagagacagatgttaattaaagaaagaaaattatcttcaattttataacccacaataataaaaaaattaacttctaatttaaaattttttgttatttgctcattttgtgccaaccttaaactattcaagtcctatcagagggcgttaggcattataaataaatgccatttattttgggaagcctggttgggtgcaacgtgttattctgtgaacattagaggggatcatttgtagggtattaggttggatagctgatgttattatttgggcttcttcctggttagattgtatttatattttcatgtgcatataaataccgtttaaccttggaagggctatctcttctatatgggttttggtacccttctgtacttatattgttatatatcttatttgcctgataataaaaagtgcagtatgtacttttatgtaaacaaaaggtgttatatatatatatatatatatatagagagagagagagagagagagagagagagagagctagagtcataagtcattgtctatactattttattttatcttaaaatgatattcaagcgcactaattaaatgttacaaacagatagaatattacacgtttaacatcaattgaatgtttttaaaatggctacgggcaagttgattatattctatggaaaatccactgtgtattagcacaaaaattactgaaagtgataaatcttaaagaaagaaagagatctatcttcaatttgataacccacaacaatcaaaagcttaatttaaaaattaattcttgttattttggtgtgtgacactccctatagctatagctagattgtaggcctaatcacaattaaataccgcaaatgcaaaccaaaaacatatccaccacatatgtaattaggataataatcattattgtatcctaacaacgtaggaacttcatcagtcgttaccctctaatcatcatggctttccttttgttgcttctttcctcccctcttatgtctctcttcttcttcttcttcttcttctagttccaacatcccaagtgaccgttacatattcgaccttgacctagccaagtttaccacacaggaacatgtgtcaatactgttccaactatggaagaaggagcatggacgggtctaccagaaccaagaagaagaggcaaagagacttgacattttccaaaacaatttgaactatatagggacgtgaatgcaaacagaaaatgaccccactcctaggggcggatccagaaaataaattaaggaggggcactcaaacctttaagaaaatttttttatgtctgcatatttagtggtgaggttgcccccgaaaaaaatttttgtaaaaaaaatttaaatcaacattttatgtataaagttatgaattcgtttaaaattatattatatatataactaaaattatttaattaagaaaatttatctataattctatactaaaaatacaaaataacaattaaatttgataatacaagtaaagtgtattaataataaaaagactataaatagcaattatctaaattaaaattcaaaagcttattttgaaaatgtaatatgaaactgtaaaaagaaaaaatgtgaatacgaaaagtaaattagacccaaattcttatctcctctacttctaccattgcagttccttttctctttggcattgttctttctgccattattatgcctttttttttccactagccaccaacattattctctctgctccatatttaaggggggggcattgcccccccccaattatcaacctagatccgccattgcccactcccatcgtttggggttgaactagtttgctgacatcacacctgaagagttcagcaaaatatacttgcaagatcccaaggatgtgtcactgcccatcaacatgcatggccaacaaggaaataaagaagaaggaacaatattcttgcgaccatgcacctgcatcctgggattggagcaaaatgggtgtcatcgccgaagtaaagtaccaaggacaatgtggcatgtgtttttattaagaagccttctgttgaaaaaaattaatttagcttcttaattctcatttttagcaggaaaatacttattattcatctactttttcttccatccctttttcaccatatttttttgtctatctctatttattttttatatattgcatccattactttctctatctacatttttctttctttccatctctctctaattatttccaccaaatccatctcattttgtagtgtacgaatattatcattctttttaataagcctcttattcttatacaagatttaaaaatattcaataattttcattcaaatgatagaattcaacttgaatttttaacttatttttattgatcagtctcattttatcttttcacatacacaacaattcaaattttgacttgggaaaattatttttccaatgattaagcaaccttgtttgcagttatttatccaagcaacttatgtaagcactttaaagaattcattaatttgttctaatagcattctcaggtctcttaattttaacttttaagaaccaatataaacaattgcattagaactatactaaggctttgcttaaaacagttttgcatttttaatatttgtttgtctactaaatatatttgagagtttttacaaaagtaagaagataatctaattaacaataacattggttcaactttttatttatttggaaatgacttgtggagtgtacatgtgaaaccattttgataggaagtggttgggcattttctgccacgggagccattgaagcaaaaaatgcattttttaaatatgcaatagtgacaggaaacctttttttagcctttctgaacaagaaatcgtaggttgtgtcaataagagccgcggttgttacggtggatatcacttttatgcatacgaatgggttatagaaaatggtgggattgccactgaagttgattatccttatccagctaaaaatggtacttgcaaagccaataaggtctgtgaattgaatatgtacgattccataatccattccctctttcatttaattaccttttgacaatataactcattaactaacttactaatttaccgctttatctctgtgttttgcgcaccttttttctggaattagcaccaaacaaggttacaattgacggttttgatggtctaatactatcaaatcatactacaccatcagagacagaaaaagcactgttgtgcgccactgttgagcaaccaattagtgtggccttggactgagaagatatttttcctacactggagtaagtaattataactgtaatatcttagtatatatttgggagtttattattgttatatataaaaaataataattttattaattcattgatttgtgtagggcatatatgatggaggaaactgttcaagtcattatgggattaaccactttgttttaattgtgggttatggttcagtggatggtgtagattattggatagcaaaaaattcatggggaatggatggttacatttggatatatccaaagaaatacgggccataaagcaggagtatgtgggatgaacttttttgcttcttggccaaccaaagagaaatcagctgcaacactggtgtctgctcgcgttaaagctgatcaaagagtggattactctcctctttgaaccgtgaaggtccaattaattatatataacgagggcttgttttgttagagacaagcatcgtatatttgtatatgattctgtgtaataaaacacaactatattttctcataattcataaataaaatagaacactgctactgttgcatgtgtttcaatatgtgtgtgtataatgccctgtttagtttttcccgtttgctagctgtatatcgtcgaaaggttgatttgttttttaaagacgacacccaataatatcacaactacacataaaagcttcaagagtcaagcttagtcctgaagggagagatcaaatgacatgtaactttgatagagtaacagcaaaatccaaactattaatacatttttattataataaaagtaatgcaattgagcacgaaaatatttattcttttttctattttttaattcataaattatataaatgtagaaattaaggtaattagaacaagtatattttctaatttaaaataattaaatgttttaactacgctaattaagattttttaaaataaaataataattaagaatgttgccttaaattataaaatatatttctaactaatcaatatttcacgcttttaagttaccagaaagtatatttaactaattatctttaatagtgcaatctgtcattttaagctttaaatatatttaaccaatggttagttggttgagtaatatttgtgattgttataaacctcataatggttgagtttgattactatgaataataaaaaactaacattctctcttttctcaccagcagatcaaattcacaatccaaagatgcctataaatatttttcttttttttaatgcgtaatggctcaatacaaggccagtcaagatcggccttggccgaatgaacaaccctcaatcctcataataacatgacgtacaattataatggaaaactctcatataacacaattatgatttattcaggacgcacacattcgccttgattctcttgaaattgaactcgttatgtaccttttactgagttgggcgtgattctatctatgtttaggagaaaagaaaggataaaatgtcttcgtctgtggacatgattttgattgtcattttaggttcaggggaagaaggacgccaaggttttcttttttccagttttaaggttatcatgataacagtggagactatccaataattttacttaattaagactattatttatctgtaaacttaactaactatttttaataagattttttttctgttaatcattatttttcatctaaaaagatttaaacatggtattttacttaagagatttcttgcacgtttccttctcccttcactaatttggttaattagactaatttttttttctaaaactgaaaatgttgatataatttaaaagctaattaaaaaaacctctcaaaatacattgagttgtagcaggtcccattgtcttattactaaaactccaactaaaataacaaatagcacatgcaggtgcaaacaacactaacgctgatgaaggtgatgtgcctctagcttatgaggctcgctgcttatcaacgattcatcgttccccaagacgtgtacgcactttaaaaaatggacaaaacttcagttgattatagaacaataattttaacagtgcagacttttctgtaaacaaaagccagaattatatcacacatcatcttgaatgcagtgtccattatggaccacatttgagtgcaaggcctgcaatattgaatgatttttcgattttgcacgtgtgagtgagacaaaagtgcatgcaagtaaattaaggatactaatattcctttcaatttatatatgccctatttttttaatatatatatatatatatatatatatatatatatatatcactatatacatgcgttattattgctttatgctatatttttttggccctgctaattaagtaacctaaatgagtgtaactattgcatatgaaccaaatgaaggaaagactcatatgatctaaacctgagacaaataacaatcaaatgcggccaaatacctaaacttcagacacacattgccgtcggacatataaataaatatatagattatttttgagaaaaaaaaataatcaaaaactctaaaacttcttcaactttgaaataattaattaagctgataaaaatacgcttgaaacccaactgggtgcagtaagctgcaatttcacttgattaaattttaacaaaccgaaacaagtatggttatagtgaggctacaatttgaaaaatgccctacttcacattcacatcaaattaattataactaaataaataaaaaacatcgtgattcaagccctaaaagtcgaaatcagatagaatacacgtttaacgtcaattgaattttttaaaatgggtatatacaagtttaatttatatataatgaaaaatcattttgtgttagcacaaaacttacagaaagagataaattttaaataaagaaagagaattatatccaattttataatccaaaataatcaaaagatatctggctagactggctttggaactgtgcctgctgcataatgaaaattcatatcaaaataatacgaaagttctagtttaaaaataaaaaaagttgggaactgtcactccactcctgcatgtttgtaagccaaatcataagagtgttattatttagacattcctctactctagacaccccatttatatttttatttttcttcatatttattttctatcacattatattacttattatacttatattttttctcttttaattttctcttttctctcactaagcatttgggtgtccaaattaaatatatttttccaaatcacaattcaattacgtatcagaaattaatttaaaccaaatacataactacgtgggaacttcttcagtcattactagctagctcactaatcactatatatacgagatggtacaagtgaagtgaccatatcttaatttcaagccataaaaactttccaccaagttatgggtttccttgtgctggttcttttctccctcttaggtctctcttctagttccagcatatctcatcgttccatattggaccttgacctagctaagttcaccacacagaaacaggtgtcttcactgttccaactatggaagagtgcacacggacgggtctaccataaccaagaagaagaggcaacgagacttgagattttcaagaataacttgaactatatcagggacgtgaatgcaaacagaaaatcaccccactctcatcgtttggggttgaacaagtttgctgacatcactcctcaagagttcagcaaaaagtacttgcaagctcccaaggatgtgccacgacacatcaacatggccaacaaggaattgaagaaagaacaactttcttgtgaggatgcacctgaatactgggattggagcaaaaagggtgtcatcactgatgtcaagtaccaaggctcgtgtggtatgtgcatgaaaccattgtttttagtacgtaattactaatactaattattaacactaatatttttttctctctttgaaaatgacttgtggagtgtgaaaccattttgatagggagtgggtgggcattttctgccacgggagccattgaagcagcacatgcaatagcaacaggagaccttgttagcctttctgaacaagaactcgtagattgtgtggaagaaagcgaaggttgttacaatggatggcactatcaatctttcgaatgggttttagaacatggtgggattgccactgatgctgattatccttacagagctaaagagggtagatgcaaagccaataaggtctgtgaatacctaactgaatatgcatgcatgcaattccttttaattaatttaacccttcatctctttgttttgtgcacttttctttttctttctgggagtagatacaagacaaggttacaattgacggatatgaaactctaataatgtcagatgagagtacagaatcagagacagagaaagccttcttatgcgccatccttgagcaaccaattagtgtctccatagatgcaaaagattttcatctctacactggggtaagtaatatatattctgtgttgtcttaagtcagacaaaaaaaaactcataaattaataaaaaataataataattttgtaaaattaactttattaaataaatgaaaaaataatattagtattatattaaaaattaaagtgatatttatgagaaatattaataaaaataattaaaattatattgaaaagttaaatataatacttatgggacaaatatttttcctcaaatgtcacaggttctagaacaaagctactaattactagcagtaatatatacaatatcttactatttgggaaaatattatatcattattatactattattgttattgatttgtacagggaatttatgatggaggaaactgtacaagtccgtatgggattaatcactttgttttacttgtgggatatggttcagctgatggtgtagattactggatagcgaaaaattcatggggggaagattggggaaaagatggttacatttggatccaaagaaacacgggtaatttattaggagtgtgtgggatgaattatttcgcttcatacccaactaaggagaaatcagaaacaccagaaacactagtgtctgctggcgttaacaaagctcatagaagagtggatcactctcctctttgagccgttaaggttcaatcaacgagtgcttgttttcttagagacaagcatcggacgtatgtatgatatgattctgtgtgaccatagtcttccacgttgtactaatgtgaaaggcaaaaataaaacacagaacaagtttttcttcaaataatgtgaaggtagaaaatggaaccatgcctctgttgcatgtgatttaaaatattcgcagatggttttttctttgcttcaagcgttttcttcaacatgcatgcttcatcattgtatttttctttatagtagtgtgtatatatatatagcgcattgaattaactaaaaaaacatagttcaaggagtattttaatttgtatataaccaagtcaaataaaaaagaaaaatagaaacaagttacaggatctaaaaagcaatcagaaaaataaatatatattgatcactggaataaatttttgtttcacacaatttaaatagacttatggcttaccaaaaaagatgaccaacataagataaattttctcttctcaaaagtgaattaaaatagatgtatagataagagatgttaattattaggtaaatgcctgtataatcaatacaaacatacatttcatgccaaatttgatttgtcattggccaagataaagcgatgatcgactatctccgttccacaaatagcataacgtacaaaatatactctgcacctaaaaggctaaaacaatacttatctttcttacataagttaacacaggttacaacctaccaaacaaagatcaatttgatgctaagaaaatgtagaaacatatcacattctttaaaagaacgatgctgttagaaagattatattttttcatagaatgtttttgttcatgtatttatttgtgcgatgcttatgccaacagtaaaaatgacaacataaaattctccgtttacattggcgtaaataaataaaaaaaatgcactatgctttggttggttgacattaaagtgaatggaaataaaataaatgcaaagaaggaaaatgacatacaaattttggattgtatgttgataaaattgattttgaataaaattaattttaattaaaattaactttgaaatgatgtgatttatatctaaatattttataaaatcaaattatgagtaaaatttagtataaaattttggattcaatgcaaatgttatttaaaattatttcaatcctaaatcaattttgacctcataattaatttttaattcttctttagcgtgaaattaaatatatgaaaatgtatttaaattcaattaatctttttcaacttcaaaccaaagatgctctctctgatactgaaaaggaaacaatggggaacgggaaaaaatggaacttaaaaaaaaaaagtaatttgagagagaaaatgaaggagaaagaagttttcattaaaacaaaaaattcatcatcatattaaaaatgatataaatgttatttaataagaagttttcttattactttcgtttatttatgatcaaacaatagaaaaaatattttttctcttttttctttaaaaaaacaaaacttttctttaatataacaataatgcaatatagaaaattcatcctttttgttctcatttgcacttttattttatttttttattttgttgtttttttttatcattttttgatttatttgtttcttttggtaactataattaaaacatttggttttccagtgtaatctctcgcttttttttttaaggatatattttgtagaaattgaactcatatcttcttccataaactcaatatatcttgtcaattgaactacatccaatggttgaagaataatctatttaactaagtgattaagaacattgctttcatacggcggaagtcattagtttaaattcaatagtagataaagtataattagaacttattagacaccatttactctagtatctaataagtttaacacgattaaaatgaatttaaaaaacaaattatcttgctgaatagaattcattcaaaagaaacacgtggcccgttataaaaaaaatccaaactgaaataattatcttaaagcccaaacccgatcaatgggataaattaaaatccagtccatcaataacaaacacaaaagttggacccaaaaagaaaatcataggaatgagataacgcaaaagtccaaaagaaaaacatagttaataaaaaaaaaaggaataatttattctcgtcttcctttttcctttaatctcttcagcttattgtaaactcattgcaaacagagagcaacactgcaatttttttgcacaaaaaaattgcggtgtgtaaatgtgtactgctttttagttatcctggcacattgacataatggaggagactctttgtgacataggttagcagtttataatacctctggattctttgtttgcttgttttaacaaatttctgcaattcattcatcagtgtatgtagactagtatgaaccaaattatagcagcgttatattagactgtgaatattagttgtgaatttcaaggaatgttttttaatttcgtatgagagtagagtagatgtcaaattcaaaggttaatatgacaataaatttagtgactaatataaattaaaggacttgcaagttttcatatttaaccttaaactcttcaaaatagtctttgtatacatatatagactttaaactcttcaaagttatcgtagaagacttaatggacagattaacttaattgaatgacagactacactttgagagactatatattttgtttttcatttcattaatcgaagaattaatttatctacgtgatatacaagtctcctaagatataatatgttcactccaacactgattaaggaacagaattaagactccgtcatgtgctaagaatatttataatacctacaatgagactccaacacaagtcatgttagtccttatgttattatgttagaatagaatttccacactcaagttgataataacatttatcgtttttccttacatataagacgaagaaggttaccaactagataactactccattcaaccgtcactcaggatctccactaaggacgtggtgggtccttacattgtcgacctgtctcagctcctaaaccgtacagtataagactataagtataacatttttttaacaaaaaaaaaaaaaaaaagaatgcgagtgccgcgtgggggaatagaactcgtctcaactcatgaaggaaaatgttaatctcttaagtcagtcttatcgcataataaaacgaagttaacttggcatccaaatttggatgatcagagcaaatagaatatcaaagcccagctttggaccctccctcagtgcctcacatgatgcccactaacatctacatcagaacttatttaaagagcgggccacattatggatgtgacataactcaaattaacaggtaattaaatacttttaactgcatctcttcttttggcaaattctcgcaaggcttggctaatggctattaattaaaaagttccataacgcaacaagacatgcatatactaaatcatatcatcaatcacctctaaacttcctagctttccctaatagattaggacaaatcactttcttggatgtcattatcttatgaatttaacttcttttttttttttttttttacttaaagcctctttgaagtttgagctaccattctttacataacaaggaataaaacatacaccatccaatgtcaatttggcgacattcatgacaaaaataacgtgtttgtgagtttgtctgtgtcattcagtttcagttgagtctatttaaaagaaaactatgatatttgaagttgaaatcttaacgcttataatttataaaatttgaacagttaggaaaggagagcaacatctcttgtcgtatagtagtctactagtatagatattaggtatctttctgaggtacacaggtggtactgccataattttgatttgagctgtgtcattaaattttgcatggatcccatatgagtcattatagagtgacaatctgtgtagacaatacctaataatcattatctcattacctatctaagaaagtgattactggtgaagcttcggcgccccaaagagagttttgcactactgtacagataatgtttatgccttaccatcattacctcatcaatatctatatggtaatggtactaatggacagaatagaaaagtaggtgtacttgactttaattcaatgtataatgtatgatagatggcaaaatggtgaaattccatgtatgaaaagaaagaaaacgaaacggataaaagcattttggaagggttgctcttggagatgtggctagtagacaaacacattggccatagtcaaagcacttcacaaacctaaaagccattacacttcactttccaatgaaaaccacaatccacatgctcttgcttggggatattgaacgatcacgaactctcctacctcctctacgctgtaccccatttcccagcgctcatactcccatttcactccaaaccaaaacacgttctctttctctcattgactgaccctacttcaccacccttctcaaccaaactttagcgttaaataattaataattaatattgttcattcaggggtctacaagtgtcaacttttttattgagacacgtatgtcttttcatgacacattcaaaaggggtcctaagtttttgattgctgagaagtcccatcgtttaatataccattggtatcccaatctttcagtcctcccaacctaatattattgaacttaataaagggaagagagtattaactcgaggtatgagggtagggtccccaaattatgtatcaaaagccaaactacagggtgttatacaattattcacgccatgaattttctcccaacctagcaccgaaaatattcctcccacctactcaaaagcagcaaaccaaaaaataacaaatttcaaaaataaggcgaaatcttatatatatatatatatatatatatatatatatataattcttatttattatattagaatatttttatttctgtgagtttattaaccatattcttatctaaaacataatctgcacatttattattttctattaatttttatttaaattatctttgtttaatcataaacattctcttctagtaggctataaagatacaaataaaattcatatctcatgccttcatgagtttgaattcatttgtcaataggagagtttcattataaatatagtttatagatatccttataagtatttttggaatcgtaaggtctagcctcactttggtgagacggcaagacttaattcaatgaaatttttataagcaccctaaatatgtatacacatattttttatttatttatacattcatttagtagtaaaaaaacatcatgattccaggggttaacaacttatatttttcctttaaaagatggatcattttgatgcgcaattcatttacacgaccgaatttcgcacctctctaattaaagattagcaaaaccagagaaaggagcaaagataatctcaagtctaaaagaaatagtcaaatccgtttcctcccccacagtatattatttactcctcctcgagacaccaattcaaaaaaagggagggaagaaaaagccatgagaaactgcataaggtgctgcatctcttgcatcctcccatgtggggctctcgacgtgatccgcatagtgcactccaatggcagagtagaagaaatcagtggcaccatcaaggccagtgatgttatgaaggcacaccccaaacatgtcctcaagaagccgtgctcctccgcagcggatgccgccgaaggcggcgtcggcggtggggtccccaagatcgtggtggtgccacccgacgcagagctccaacgtgggaagatttacttcctcatgccactccctccttctcctccacaagagaagaaccagcagaggaagaagaagaagaaggaacacagagagagaacaaggaacaacaccaacgtgtccatgactatgtctatgactagcttgcttgcctctgatcgctacttgaatgatatactctcagagaaggtgtcaacgcaaagagacagaagaagagggcgtgttgctgtgtggaggcctcacttggagagcatttctgagtcaccttctgatatgtaacaattcttcttcttcttccttcacaaatcacaacctttgcctaagggtcatgtcatgtccatatagtttatattataatcctcatattttaggcttccaaccccattttttcaaaatatatagagagaaaataaataattcctcttcttttttttttaatgttttactctgcttctgcaaaggttgctgtgtacatagggttgtccatataatatgaggtttgtaattaaccagttggagagtttaagttatattagaccataattgagtatgttttcatatgcatcaaggttttataaaacggtctgcaacacaacacgtcaaggttttatggtttctgtggtagtaaaattttctgtatcggctacatttatctgaaattttctgtaatattaaagatcgcaacaaaactgtaacggtaatttaaaaccttggtttttgatagcaattctttttttttttttttggagtttttatggtcgagctacaattagtggggcatgaaattgatcagacggtgttataaatttgtaattttctggaagaggtgaaacaagcgaagaagtttgtaatgggtttcaattttttttgcctttaattgttgaaactcggaatttagaatagtacacggtacaaagataagctatgattgagatgcagatagaacgatcctactactgtgtcactgtaatatgtgtaattctgtattggatcataatggaaggtgattgcgacatgatagatattatttatgcttttgccagcacttgagtttttttatttaccattatttctattgattcacttatgaaaatgacacagtagttcgtcagtgtcagtcatcctttaaggagagaaggtgacataatgctacaatcactttctatacagtactgagctgtgattataatagaattaattcaagttgataacttctcctccttttttctgaagtgggaaaaaagaagaaattcttttggacccccaaatgggggaggacagattcattcatcagtgtctaatctatgcagtgcaaagccatgttgaacttcaccccactacaaacaagtgagggggaaaaaaaagaagtaaagggaaaggtgaggttggatgaagaaaaggccaaagagataaatttgtggtaaaaagaattgaaagttcccacattgctttcccattatattctaataatgcattaatgttatgctaagtttgcataaatgagcgggatatggctttagtttaagcatcttattcttttgggtatggttatgattgggaaatggtttggttagtggcagtggcatcatgcaaaggtattaacacaatagagtttgacctttgggatttgcaggatggcgtgagccttgagcaaagctctattctagtttatttctggttctgattctccttttcttatccaagagcatttatgtttttttttttttttttttacttgaatgttccaccatcagtggccaataaaatgtagacaaagtagttagtgtgtagattacaaaagttatgtagagtagtaagttaatgtgcagattaataatataaactttcttagttattgttattatatagtactggaaaacggtgtgcgacaattaaatctttgatccactaaaagaatttttcatgtttgtctcatgaaacgtaagtgttatcattgtggatcgggtgaaaataagcattttcttgttccaaaccagagaatttattactagaattatttatctggcagttgtcgtgctttttcttatatagaaataaattgacatggaaacaactaaataatgacaatgctctgatccgttaggcttaattaagtttctagttttttaattttttttagattttaattttttgttattcaaaaaaaattatgtaatttttagtcttttattaattaactgtcagcatttttagttcttctaaatatttttgcttattttttagtttttttatttttattgttaaaaattatattttattttgtcaatttttaatccttaatttattttatatttgaaattacttttttaacagaaaaaagaacgagagattaaaaatggacgaaattttttaaagagattaaaaatgatgatgaaaaattaatgaggactgaaaaagttattaaaaatattctgaaagattaaaattataatataaaaatttaaattaaaggattaaaaattaatcaatcccgttaattacatagaatttgagatcgaagaagtggaagagaaaaaagtatctcaaaaaagctaacaatatgctgtactctttaatatatattcttctaatcaaaccttctatacagtacattataaaataacttatatttttaccttctgaaaaagctaacaaatatatatttgaaatatagttggaattttgttataaaaatataaaaaaaatttagtttcatcacttattatttattgtgttattttttctctgatgtagttttgaataaattctaaccattagaaataatgtgttattaccatccttcgaagtatttttatgctgttttattaggaagagaaatagagaaaataaaaaaacaaagcgtaagataaaaaagaaaaaaaaaaaaaaaaactcctttcgcaagaagataaaaaaatgtgagacccactcaaaaattaaaattttaaccttgtccattaatctctgccactacctcacaagatttacacatattaataataaaaatgtatttttataagaaaactctattttctttcgcttcacttttttatccaacaaaatatgtgagacaaaactaatgttttgtttctattttactacttactcattttatcctttctaaaaatctactcaagtaaaatataaaaattaatctataaattaatatattaaacttaatcattaaaaaatataatgttttacttttaaatttaatgaataaaaaatataatgttttgcttttaaataaactgtaattaaaattaagaaaagttgaaaaactactcacagtgaaggagtttgattaagaccttaaattcttaaattcagagtttatatgtgtttctatagccaaaggcaaagccacctcattgatacataaccaattgccccttcaagaaataatatatcatactttaaagctataaggtgagaaagacaagcgtatattgtgtgcttttttttattcttataaagagcgtatagtgtgtgctttaaaaactcagactataggacttcttttatgtcataatcaagataaagactaatttctaatcttgtcacacatcttgtgagtaatgaatgaaataaaacatgttcatagaacaatttccggtatcatgccactaataatctataaatcatttttttaataaatactcccaccaactaaggagatcgatcacaccatggagttttgtttcttcgtaactcaaactagttaagttaaacttgattttgctttacactatgcatccatggtcagatttaacagttgtactaaatttaatggtggtatgaactaaacacaaactaaaatcaaaatttattgtctcttacgcacaaaaaaaagatacatttacgaaaacgaagaaaatatgaaaatttagcagccatgatcccattaagatcaagataactaactacattcctaatttcattacgtagtaagtcaagtacaaattttatatctatttttctctacattaatttttatatcaagtcctactcattaaatgtcctatagaaagaaaataaacataaacctatcacgtaaaatttgaatatgaaaacatccatttttcaaataaatttcacatcacttcactatgtgtctttcttattccctcttttctccaatagctgggaagaatgcaggatacgggataacaaaagaagagctcttaaggatttggcaactttttcaaagagggcgaccactaagattgggtggattcttataattaaataatcaaaatgaaaagctgaaaaaatatttttttcctcctctcttttgtgctctttgtggtgcagaatgtaaggaatcgaaaaaatacagaaaaatgcaatcatagatgcaagcggcgcctcacttttgcatcgataattattaagattgaacctaaaaggtctctgtctcattcaataatatatattgtgtacaccaataatatattttttaatcacccctataaaaaagaatacttttaatggataatcagatattaatttctttcgaggggtaaaaatcagttaaatgaattttatctttctcaattaaaatatttttaatttttttttacaaaacttaaatcatgaaatttcattcataataaattggaagataaaatatgttgataaactttgagtctaacatgaattgtggccacgtacttttacaagtggcctttaatgttcgcttgcctcctatcaaactgaatcctatagtttgggttttgtgcaaatttttacattgaagaataatgtatcctaacgcacaagcattttggtcaaaattgttaattttatctacaattaatttgtaatcagattaaaaatgaggagttaatcctagatcagccatccaagtaatagtcttcaggagtcccaacactttacatggttaggaatcaaattcttaataatatgttcaaaaacttagttatctgtggactgtacatagcgttgttgatgaattaatgtgtatctcataatatttaatatgaaatttatataactttgatgatttatgattgaatttaaaacattttcattgtgtaatgattaaaatatttttttattaaaggtgtttaaaaccaaattaaacaatttttaattattataaaacgaaccaaaataatcaaaatcaatcaaatccgaaattagagttgtcccaagttcttgttagtaatgatgaggcttatggaattggcttgaggtgtcggtgttggaacaaaacataatcaacatagaggaagagagcaatttgatagtatgaaaaacaaattggaagacacgaacgttccaggttttacatggggattgacgtgatttaaaggtaggacgacgtccaattcaggtgataacctgcctagaaaatttaatttatatgtcaaaagatctaattggagggataggatagggaacagggagtgatgacagatgattttttttatgcagactttcgaagtatctacaatttatcttcttacttaaaaaagagatatagcttagtccggagaaatggtgaaggaaaaagagagaaacgagaggtagtagtttgaatcctttacattttttaataaaattaataaattaacatttgataaaaaaaaaatcttgtttctcaaaaaggttaagtttgtgttgttatggtagagtattatataaaggaagaattttcttggggtattatatatgaattcttgaatctattgaaatgcgcttagtactctaatatgaactctgacaaataattgaacccccaaagatgtaatggattttgcattttcatgtgtcttctatactaatcaagttaatatagtaatttgtagagtaaatccttcttttaacccttgatacaagtcaagttctatcagtctcgtgttattacactccccttccccaaaagttatataaatagatgtgaatcctccgcagttttaaatgaaccataccgtgtacagttgttattaacttccctcttcaaaagttttgaattatcatattcattaattttattaataattaatttcagtcaaaaactgatcgagatacggagggaatattgagtttgtgctaatattactctgaattggttccaaaacagggtgtagagaaggttggaaattgtcctggcatgataattggctaatattactctgaaacattccttgtctagattatttcaaatttcaaaagataaaaatgtgtatcttgtagatacgggagagtggtgaaaaaatgaaatgacttttgggcttgtaaattgaggtggaggagttttttggtctaggaaaaacatacactaattattaaaggtgtttatgtaattatgtccccattaaattcaatctccctatttaaggaaagggcagatgcatgggtctggaagttaggcagctcaaatgttttctaattaagttggatctgtgtacagattccttcggaattagtaatctctaattaccgattttgatattttctaaagtttctggaaatgccttgtccctcaaaaggttcttacctgctcatgccaacttctcttagatatattgccaataaaaaggggattatttagaagaaatattgtcattagtagtcatggaactaaatgatatgcattatgtaaccatctttttctgcttgagtacagctcgtttagtggtatcatttgcgagtggtacataatgaaattttatttattgatttggttattttgatttgcttagtgttcaggatatcattaaggttgcaacttggtatcattaatgaaattccatcgagtatttaactaactgaatatctagattttgaatttgagatcactcattaaggtttttattttttttattgattattgatttgaaagtacattctttaagtagagtaagaaaatcaattatattcattcaaaaaaaattaaaaaataaaaaacataggttcaacttgtaagaaattgacacaggtttcatttttacaaaatacattcttgagaaaaaagataaagaactaaaatatttaaaaaaattagcctcatatttaaccaaaaagataaaattctgtaaggatatattgaaatcctattagagaactaaactatttttgtatgtatcgatattactttaggggtggataaactatcttaagtctccgttaattattaggatccaaaattataatgattggtgttttctaggttgatttgagaaagaatttggaagacaactaaggaagaacgccctcataataatgaataaggcgtcaagtaaaaggatattcttgtcagatcagtcaatgtaaaaattgagaagatgtgttcttgtgaattgtgatcacaccatgacaaatgcaacccatctatgagtgttagagaactaattaataactatctactatattgtaaataacctaatatatatatatatatatatatatatatatatatggattactaatgcactcattgttttttagtacgagtacattagcaattaacatcaaattttatgacaaaaaattaatatttgacttgactttaggaaattatgtatctaacctaacaaatgccaacaattaaataattataatcctacacctgactttaggaaattaaaataaaaactaaataacattataaattatatcttaatattctatgaccactctatagaatttttaagacacttgactttcttctttttttatttgtctctctagaaccatcttatcagagaactaaggcaccctaagtatatatgtacgtatctaaaagaaacaacaataagattacaggagcaaataagaatatcttaagcagaaatttacttagttgaggctaaatgttctttatatatttatgtctttttgtttatacatgaacctagctaaaatctcactcacaaaattctcttcaaagacaccagggaaatgctgaaagagtgagaggaattctcagcaaagcccaaaatgataactggttgttcgagctacaatgtgtacaatagctggtttagcctgaatttaacgaaacattcgcttaattttaaaatttatcctaaaattgataaaactatttaaaaaaatgagttaagaggtaataatttccgcataatctaattatagctcattattgggcatttgggctagtctaatggtaacaatccatactataagcccataaactataagccaaataacaggctaatcatatcaattatcaataatattccccaacggggtgaggaacaaatttttaagactgattcaattatgctaacaagctaaacaccaaattttgggtgttcccactgcttgtcagatcatgtttgaatccattgtggctaagcaataaagccaagatggctcaggcaaagcaatggttgaaaagaaagataatgggaaatttgatacagttccatatggtaaagctctaagaagacaaccatacccggctactacttcagcctatgtgggtcgacttaaggatctcaaatttcggcacaattatgtaggtactgaccaatccataagctaacataattggagttttttttttttttttctttatgtacttctggcttccggaatgaccataattggatcgtatggggttggtagtgtggctagacctatttagcctaagaagtgaccaaaagctattggacatagtgtttgccaacttctcaagagaatcaggtccagacaaaattccaaagcatattggtgacagtgtgggccttttattcgattatgaaagtgaattcacaagaaccagtaaactatgtgtgatagaggttgaggcaagataagcgagtgtgcttattaattatatttatgttatatggtatgatgttttggggtgttggtggctatgttacccaatcaactgcacttaaggagcaaaacattttcctgatggaagatcaaacgcaatgatttgtgttatagggagattccaacccgtgtcctgataactaccacttgagctactttgcagggacaaattgcttaaaaagttttgaattttacctttcgatctaagactatccattaatcaacatggtaataacacgaaaacaactttattagttcgctatatatttttattttattcgaagcatggaatggttaggtgctatggtacatatatcccttccataattggatgaatcctaaaattcggtaccttaattgtacgttctaataaaaaaaaaaaaaaaacactttctttttgagttttgagcctattgcctattgcctattgcccattgtgtttagaatgatctgatgatcccaagcgatgaaaatgtatgagagcttttgggaattaatgctacatggcctcttggaccattcatgtcagataatactctgccaattgctaattatgtgggttggaccactcggtataacgggcctaccaaaatgtgacagaaaacttatccaaacctttgcaaaatacagacatatttgcaagcgcatcaaacaaacccagatcctccaccctggcaccagttttcagactcttgaccacggccatcactagctactagtactagtgtatttggataacatgtaattcattctatcctacaaaatcatagtaatagtaatatcaataaaaaataaaagtaactatttattattttattttcactatcaaaaatcaagtaattttttcctccataaatttattccaaacatattatctctcgacttgtatttcagcgtcttctgtggcagtcacgtctgttgtttggtttgaatcgtatttcaagcagtcttttttttttatcttaatttagatgtttcttttcaaaggaaaaatatgcatcacacgtttaacatgtctgaaacaatgtaactgtttttttaaagtcaagtgaaatttaatgataataaaacttagaaaaaaacacagggtatataagtaatatatgaactgaaaatataagattgacttaacaataaaagatgaggaaaaagaaattgtgaatttcaaatattcagttaacaaaaattaacaaattaataattactaacattttatttataacatgagcattgaaagcatgctaccacacaattatacccttcccccacatgtaaatctaaaaaaccgaacaccccataaaattataatgactttcgtctccaaaaccaaacactttgcctaaaacaactgtatagaagcacagctacaaggaatcaaacatttaactaggaacaggcttgaaattatccaattcatcccatatatataagaattctaattcactgaaatactcagtgacatttagtgtatcttgatgcatataggatagatgttctctagcagatcaaagattttgagaatgtcccctttgcaaattcgatctatccatagatggattgcaacatcaagtcctaaatcaaacaatgaatccatgcaagaaccatcacatcttactaccatagtccaaactgcatggatcgaatttgacatcaatgaaagtatggaacaggaatactaccatagtccatagacattcttcaatttgttcttgtggccaaaagagccagttttattgttctatcccatgaatgatagtttctaccatttaatggagaaaaaacaagcacttgagatggactttcacttgcatggaagaaaagagggtttgatggattggtgagaaaattagaataactcttatttgccataattttagaggagatagtaacagaaaacgatggaaagaatcacaatgagaagaatatagattcatgcattaaatgtgacatcctgcacatgaaccagaaccataaactgagctataactgggcatgtatttagtttgtgatggtggtgtgaccgttcatgttgaaatatgaaaggacatggtatctaaaagtttgatgagtattctatttattgtatataattagtttatcatgttaactaattaatatctcaaccaaaaattgaagaataagtctaagtcgtaagagatttatcttgcatcgcttttcttcccgataatattggatataacttgtaacattaattaattaattatagaacttgttatttgcttcatccgctaatttcgtctattcttatatgtacatcaacttaaagaaaacttacataaaaaaaaaaaatcaacttaaagaaattttaattgtgaaacacctaagaaattttgaaataactcgatttactgtgctcttgaaagaatgaattccagtgtctcccgttggtaacgtactgggcaatcgatgatggagggtttgatggaaacgaatgaaaagaatttggaggaataagttaattagcagaaaatcctctttcctttgtgttaatttgaatctaccatatcttggaagctaaccaaactctttaaataaatggtttgtgatgtaactcttagtagctgattaattttatcaagacataattagaaatttatatatctttcgaaacctccatacatattgatttatttcattgcatgaatgatctgtgtagctttagtaatataaatatagagaaatggtgagcacaggtaccatgatcccatcacctgattgcccttatctgtatttgcgggatgtgtacgtagctcacgtggatatcatgtgaaactgttatctctgtctgccccttttatttaatctttcatttattaaaaaaaaaaaattggaacttttaagagacttgacttcaaatcctatttgaagacacaaactaacaaacaaaatcaagaaatgaaatgtctcaccttcttttactaatgatacgttatatgatttcttgatacaatgatacctacgtacggataatacaaacaagttattttcaacatttataaaattctattgcaaagggatttccaaagtttgtgagcgtggttgaagagatattatacttataactttaggtgttcttgaaatttttttactaatgataattgagattaaaaaacatgtttacatcaatataatatactactcatgaaagtataaattgagtagatttgatagatttaccgtttttcttttaattttttctacccgtgttaagtgagagttaagcataccttttttttcactgaagagttaagcacaagtaagtatttacaccttgacttattttaatattggcatatgaaaaaggaaccaagtaactaacccattgaactggccgtatgaattaataaatatcattcttgtttgggatacgtataccctgtaaagaaatgggacagcacaatcatcttactttctatgtaccatattttaacgaaagtaaacaacaaattaatgacacataaaataaaaggccgcaaagaaaagataaagaagaaagaccaggaagaaaaggaatggaaaattgaagtcatccaactatttaattcattcatacatagagaaaggagtagttcattttggatgaatatataattaattgcaatgagcagttaattatggccaaagatgcctaaatacatgttaacaccttgctttacttatctagcctgccacgcattattatactatatttgctttcacaatccaataacttgaatcatttaatttatatacgataaattaacaaagtaattaaaatataagttcaattctatccttttgaatattgtgaaacctatacaaattgaaggactaattatgggcactgcctgtcttcattgattactgtgacgcaacagcgtgaattttccactacgcagctaattaatggcagcattggatttggcaagcagagagccgttgtggcactttgttggaattatagtactactttataatagttgttggctcatatacaaatcatagttatttatacacaaaatacaagccatagttcaccacaacatgagtatcaccattttaaatttgtttcaaatgctcatgttcgaaataaatattcgatactgaatgaaaatatgatttattcttctttttcttgtcgtattcatgtattttttttttcatttttgtatttaaatgatgaaattgattcaaataaatcatcaatgtgaattttttattttatgttttcatccattcatatgaatttaatagctcatgataaatataagtatgctattattattattattattattatatcatttaaagattttatacttggattgagaatataatcataagttaatagtcttttcaaattttctaatatatttttattttttatatatttttctataattatatctgtttttaattttttaaaagtaattaatgttatttttacctctaaaatgagggtaaaattgaataagattatattaaaattttaaaataacgcaaataaatagaaatatttttaaaagaagtgagagtttaaaaaacattaaaaatagaattcaattatatgtaaaaataaatattggctaccagaatagttattgtttaatttattaaaggtgtttttttttattatgtatcaatgatgaaaaaaaagttaaaaaataattgtttgatgtaaatatttattatatttaaactttaaaagctatatgatattatttaaatgacttaattcaataaaaatatatttaatgttggtacaacatgtatagcacgcaatataaaaaaaaaaatgtatttaaataaatggtgagtttctactttctacttaccgattagggattatgcgtgattgtgtgtattggtggaaacaaggattcgaaaacacaaattaagaatatgtaggtctctcaaagatttcagagtgttactgtgttactataatgactcgggaataatagtagtataatgatcaatttggtagtactattataattagattcaaacgaatcaaatgacatttgttttgggtgaagtgaaagccaataaagattctagatgactgttccaagtcaaatctttcaccaaacgtttagatttatttgtcaactcttacggactcaacgaaagagactgttgatcatattttattcctcaagaatttggtgaaaatgccctaagttgttgtttttgttagcactgctgttaactgctccatgaatcgtgcattttttagaatgcatatgtttgactataatgtcgaattaaagcctcacaaaaaacttgcttatcatgattatgttattttttgttatccattttccacttagatagcccatatatcaagatctctttttttttttttttgctatatcaagtaatacatttacaattacatttaattactggatcgataaatttttaaaagacgtggattacaattcatccattggctaatatagcttaacaactccaaaaaagaaaggaaaaaacttcccttatctacatttatgatgtatggcaaaggacatatgaatttgtttgccccttactcttattaatgacaaatctctttctatcactttccttttcccgtttcctttactttattttctttgacaaaaataccatctttgtacttagatttatgtagcccttgccatgccattactccctctctctctccttattagtatctaattaattaccatgcaagaaaagattacagagtgtaacatgcagtcgccattactgagcagctcaagtaaatgacttcaactgctttcttataattcatttatgaatggctatctaggtacgtactactactacccttgaaaaatccatcaatttctcaatataagaattccatacaacattttcaatatcttttaattaattaatattctagattctagctatacacatcccattacataaaaacaaatttggatcttagcattaaatccttgaactaattaagactatggtgctatacatatcccaccacataaaacacattgtagatcttagcattaaatccctgaaattgaaacatcagaagccattccatccgtaattgtcacccgaagcaccgtatttttgcgatcataaacatcaccatctcgcattatccacttcacatacggataattctactacttcgccattctcaatttttgtttcattttatttttttcctttcataagttgaccccaataggatttcagaaacaaaattgaacatgttccgattcatgtctagagttagggtccctttgcgttttaccattttgaccaaacctcaaaaagtttgtggtacccacgtcgaaggttcggagccatagaaagaaagccacggtttggtcacacctcacagacccaaaccagtcattttatcacacaacattttccggacacgtaaggcattaaagaaaagacagagggtatttttggtattttaaatttccagccaatgttttctcagactatcgtttcggttcaagaatggcttgcagggttggcaatgtccttcttctcccttacctcaccgatccgtacacttaacctgctttctcactcttcgtcgcttctctttggcagttaagctgcttcaatccacacacccacctaatttctctctctaaaactaaaatctcccccccgcaaaaaaacaaaaaatccatttttttgttgttgttgttgatatctctttcttaattcgttcatttaatgcttctcgtcctacacgcacattcattggtttcagcagaagagttaacagctagaagggggtaaataaaagaggaaaaaaaaaagagaagagaactttgttttgggttttcactgtttgagtgagaggaaaatgcctctggtgaggttgcaggtgaggaatgagttcggtttggggcagcctgagttgtacagggagacaaacaaagaggaccctaaagctgtgttggatggtgtggctgtggctggtcttgttgggatcttgaggcaacttggtgatcttgccgagtatgttttctttgacatcatcatcatcatcttcttcttcttcttcttcttcttcttcttcttcttttttccatttgggtttgtttaaataggtgcaatttgcaatttttatacttatgggagttcttttggaaatgggcttggttaatttctgtagtttcgaggctctaatggggttgaaggttgggggttgctgagaatgttggttttagttgtaaccaaatatggctgagtttgttgtttagagagaatggtacttagccgttggaattgaggtctgttttttatttttcggattttgggccaagtttcaattgataaggagacaaaatgctctttgacttttgtttttggttgagctttgtgtagactcgtataagttgtgtacagctcgaccttggttgctatttggataatcactctaaatcattttctctctaagagtttgggtggttcacgaggtgcaatagtttcgaggaatggatttgtctaaaaatgctttcttgttctaactttgtgtgctgactcctgatttttcttctagaggttttctcttttaacttaactaatacttccatgtcatgctccagctaaacagctgtaaatatagtccgaagtagaaggaatacgactaacctgaatgccattgtggattttttctagttttcggatcgtcattactgatatatgccaccttcctcccgtctttcttactccttattttgatctgagttactattcaaaaacttatattttgatttaagttacaatgaaattgggctatggttgcggaagagttaaaattttaagttcttgtacttgtagagctttgttgttggtgttgttgttgttgttgttgttgttgttgttgttgtatttatagagcttgttggcaaggttggaactccaagcaatttgattatatattttgattttgatagagtagaacaaatgtgggatcttgtgtgttctttcttcaaaaccttatccttgctgaaccccatttggacaagttgttcttttgtgagaattagcgcttaaatagctagtaattattgttagttttgctagatgtaaagccttacttatggtgtgtgtttgttgttttggaaatatcccatattatgtttgcatatttcttaaaataaatcatgaaaattttaatgttaaaataaataatgatttcttgtattggattcaatttaatctctccaatgtccactgtgtactttcaacctattctgctatctgtttgtgtgtttggtatgtgtgctctgttatctaggctaaatataattacacagttactgataattgtgacatttactctatgattgttgaaaccttgtttaatatttgtgtggtgaaggcaatttaatccaagtagttctagttttcctgttatttgtgttgatattcatgaatgatgaaacttttttgaaattgtagttttgcagcagaggtttttcatggtctgcaagagcaagtaatgacaacagcttccaggagtcatagattgatggttcaggttcaaaacattgaagcttcactacctgccttggagaaggctgtattggcacaaacaagtcacatacatttagcttacacagctggtatggttcttttaggcaattatctcattctatgtgtggacttattggaaatattaattttttttttcagaatatgttaatttcatctctgaatgttattgcctcagaaagatggagttattgtatttttcttaatgagggtttatctttaccaaattttatttgaagggaattttgaaaaccacatagaatttctccaaaattatataaagggcggcctaatggggtcaggaggctatttctaagatttgaacatgtgccctgccaaaatatatcttcaaataatatttgtaccaaaaaaaagtgttatttttaaattaattcatcctgagtaatgtcacagaatgcaaatcattaccgttttacaagttgtgacataaacatatttatgccccgagtgaatcaaatacagtagcttttgagaagttattcccatgttaaatatatgattatatcacaaacttcttaaacttgtttctttgagtagaatcttgatataccaatcatcactaaacattaattgacacactagaatttgtatcaatgaagtaatgtgaagggctctcatttgtttgtctagtattgtgctgatcaggcagctaaatcatattgaagttaggttgttttcaatgaattttctttctatttcttttcattgttcatgatatccactttaatctgcttttgctctctcttttgcatttgttaaacggaaattgctctgagaaatctcatttgtctttgggtgtgccatagttaatatatagatagatctttgttagcatgcaagctattatgttgttattagacctctaaaacttttaggaaactggaagtactgtggttggttcagtattcatgtcttcaatatgttcaacgagtcaaggtattgtgatgaaataggggctgatatggtcatgatttactgtaaatatgatgaagattatatatcaaatcttgtgtgtacattgtgatttgtttgacatggaagctgatgtgtgaaagacactaaaaagcaaactcataatatatataattttgacagtaatgtttatctcagattacattcaacctgattgcagtcaagtggcattaagctagatttatgcactttttagatagcatatatctgtatattttacttcattttgcaatactacattatttaatgatcatgatttcaatgttcaaagattataggagttcttaatgaaaagcagtttcctttcaggttgtgaatggcatccacacatgaaagctgctcgaaatcatttcatttacaatgacttgcctcactttattatggattcatatgaagaatgccgtgatcctccacgtgtacacttgcttgataagtatgttaaatttccttccctgttttgtctttctgtttgagattagcaagattagttaggtactacttcttagactaatttccaaggtctagatgataaaaaggtacagtctagttcaaatttggactggtagccctggatcttgtacctgtcctatttggcatctctctctggtttggaaagagttgaatacagtcaactagtcctgcttaaatcaagtgtcctgtactggttaatgaaatattccatgtgtccatcagatttgatactggtggcctaggatcttgtttcaggagatattcagatccgaccttctttaaaagagtatctgcagattcagacgaatcttactctggaaaaactgaaaaagcaaggaaatctcataaaagcaaggtacaataatgatcctagcatttcaaggggaagattatttttaaccctgtttctttcctgtcatatgcatgcattgatttttttgcaaacaatttcttgatgcttacacaaaaaatgttggacagaagaaaagatcacgaaggaatggagacattttaaggggtgaacagaggcatagcactagtggaaggtattacatctatatatgtctatttaatcttggcgtatgttgttcattcaaaatcaacacttacatattatattgactacccagaatgcaatctatttcttctgctatcaatgggcaaacttcttcctcacaaacagcttccaccatagatatgacaatgaaatcagatctggaacattattcaaattcttttgattcaaaatctggtgctggctacattgaatgtgttttccatccaagtaattctatgcaatctgatgagccagattataaagaaccatcatctacaagattgaaacagaaagctgatactctgtcatcagtatctcatcataccgatgatactctgtcatcagtatctcatcatatagatgatagtatttcacatgattcgttggaaaagcaagttgcctctagttcatttggtgttacttgggatgaaaaggaagagatagtggaatctaagagtcaaacatgtgatagaaataaaactccagagaggcttgtggaaaagcatgactcaaatatgcatgtgaatgaggttgttaccataaccaacatcgactacaatcatgtcctatttactgaagcaaacaacctgaaaccagtccgcaatagggttcaaactgatgatattgatagtgaacctgataattatgtggatgctctcaacaccattgaatcagaatctgaaaatgatattgattatataacaaaacgagaggtgcagcagttatcttcacgtatcacttgtggaatgattgaaaatggagttactgaagctcctcctaatttaatggacaataatttatctgatgtcgtttcccagactgattatactattcccttaaatgaagaacaagggcatttagccgactcactgcaagaaaatcctgttcttgatcttttatcaaagccaaatgcatctaatttgggatatgtaagtccatctgatgatcttgatagagaaaatatgaccagagacactgcttccttaaacaaagaacaattcagggatttgcctgactctctgcaggatattcctcctctcacatcagagcctcgtgcatctaatttgggacctgtaagtccatcagatgttccttatagtgaagaaatgaccagagacaccatttgcttcaataaagaaatgttcgggaatttgcctgactcattggaaaaaatttctcctctacatcagagccacatgcatctaatttgggacttgggagtccatcagatgttccttatggtgaagaaatgaccagagatactgtttgcttcaacaaagaaacatttgggaatttgcccgacttgcaagaaattcctcctctcacagtagagccacatacatcaaatttgggacctgtgaatccatcaaattctccttattgtgaagaaatgaccacagataccgtttccttaaacaaagaaatgtttgcgaatttgcccaactcattgcaagaaactcctgctctaacattagagccgcatgcatctaatttggcatctgtgagtccatcagatatttctgttagcaaagaaatagccaagaatatagctgattctcatccctccaagactcctgccggtgtgcaggttcctcacacaagtgaaaattctgttttggataactcagtatgcactgatacctacattggttcttctactgttaatgatacagtgtcagcaccaattgagactgatatatcattttctggttccaaaaactctaatttaccagatgaggaagcaggtaagatcaacaacagtatctgcaaatctgaagagactcgtagagagtctttggctgatcattcagttaggttctggactaatggtggattattaggactcgagccatcaaaacctcctgactttaacaagtcaacttctttaggtcaagggcctttgatcacaaaaagtgaaacagatggtggttcacatcataattcaatgcaaaagagcaatggttataaagaggaacagggatcatcagaagaggttgctgagcagattctaaaggaaccaaattctagattctcaacatcaggccataatgatgaccaagcttgtgtctctgaaaaggccactggtaattctcagcacagtaatggatttggtcagactgagagggacagtttaggggaaatcagggtaattgcacctggaagtattctcccatcgacccctgacacgaaggacagtactgaacccaaccagggaaatggtgaaaactcatcgcgtgtgtttggacttagtcatagattactaataaatagctttcagcggaaagtttcttttgatgaaaaatctgaacattataattctctgaaatctgttatattggaccagagtggacaaaatggcattgtaggacaatcacttcctgagacaacaacctccaaagagaaagttggttctggatatcctataaagtcacttcctccttcacctccacttgaacatatgaaaatatccttccatcctgtcagtggactagagacctccaaattaaaactgagatttcctgatggcagtaatcatcatgaaagcgtaaaggatatgtttccttctttccagctggtccctgaagcttcccttcctctggatggttcagtttcccactctgatgatgatgacactttctgtagatcatctccatacatatcagatgatggtcgaagccctcactctgactataattctgatcagtgggaatctgatgaggatccagaaagcagtgaccaaggggtacatgattctccttgcagaaggtcatcaactgaatctgtgtccaatgatgataccaatgtaaaaggtggacatggtacatgtactatgaatggtgtggaacattctctgtccaggcctttacttgattttccaagttacgataatgttaatcctgcacttgagaaagaaagtaaaaaacattccaaatgcaataatgctgttatgtcacatagtcatgcagagcctgcacaaccaccacctcctcctcctcctcttcctccaacgcaatggcgagtctcaaaatcacagttggatatgacaaatgggacacagtattgtatgtctgtagatgctgaacatattggtgatcacagtcttccagattctactatcctccagcagcctaggctcacccaggttgagcaaatacaaattaatcacaatgatcatgaatcttatgacaacattatagataaattgaaggacaaggtaacatttggtcttacctttctcttgaactttgtatttatgcagccatggtagatattagaatttaacaatgtattaatctcattgagcatttcctgcagctggatcagcagaagttgaagggtcagaaggaagcaaaccagttgagaatgggaaaggagacagatgaaagagaagatttcctatatcaaatcagaacaaaagtatgtagtcatgttataatctccactatttaaggttaactaaacattttggtcctccacagatataagtgtcatcaacttcgtatttcattataaattataaatacgtcaaatggtcattaaatacttagttattttttagatctaattagtcctctaaattacaaattgatgacaaaaatcaatccagaacatgttctagcaacattcaaataaatcatgttaattgtagtcaacttttgcattgacttgccatatatttattggttcaggcattcaacctgaggcccacagtaacaggaaagtcaaatgataccactggttccacagcaaacgtcaaagttacagcaattttggagaaggcaaatgcaatccgtcaggtattggtcactcttcttttgttatctattactcttttccccaactgtgtttatatctaattagcatccataatggagaacctttcaggttgttgcgagtgatgatggtgaagatgatgataactggagtgatacatgacatgtttttcttttttaaaaaaaaaattatttcatacacgagcagtcctttatgttttttagcctcttgaagtgaagttgcttgaggctttgttgtatgtacacgtgtgaataaatcttgtttatctgttattaagtgtagtgcagtttctttcattgtcgtatgatgaattaatgtcttcgttagtttttgcttttgaatatatgggctaggaaatcaggttgaccctatgtattgtgagatcacaaatccaggccattgtttgtaaaaagttcctgaaaaaaaaatcataattccgagtacttgacttgatttcaatttattatctccctctcaacggcaagataggtccatagttggatctcgacccttatatgagaatgtttatgcgggaaagtaggtaaaaacaattcttaggaaattatcaatttcttgaaaatatttttctttagatacataccaaacttaggaaataaaagtattttttttataccaaacgtcctctaatacgtggtaaatgtggtaaaaaaaacgatcttcaactaatctaaagagtgtaccaataaaacaaaatattcttcatatttaataagaaatatttttataaaataataaaaagagaatattcaatatgatatgaactttttttttaaatgtaataccatacttaataaatattatccatatttatctttttgatagtatgaagaacttatgcactagtaatataaaataatatttcatgattaatgtatcttcaagatatccacggaataaaaaatacttttaagtaaattacattgagactctccttaatttttgagattgcgtacaacccccttttttttttatgcttaaagcaaaattcctcttggttacaaaaataaaataacagaatcctttgtaaggtttacgatgtagtaatgttttatcaaacaaatatggagagctaatataagaggaaaaaaaaagaagagatatggagagaaatttgatgaaaccatatatatatatatatatatatatatatatatatatatatatataatttgttcaatacttttaaaaatgataaaataagaatgtatttgtttttcaggtttaatatagtaaaaatataatgtacttgaaacgaataataaatgatactgtaaaactattttatattctgcacataattaataaattttttagttttatttttatttggaagactggaaataagatgaacttttcactttattcttcatttattttcttcaactttattttctctctctctacaaaatgcaccctaaatgatggcaattgtttaacaggttacccccacaaattcctgtcctcagtgccattggtaaatcaaatcttaattctgagataagggttgaattgctgcacaagctgaatttcagaagtatatttatgtgaaggttgaagatcctcaacttgcatcaaagaatcaatcaggttgttcctcatgttccatcgcgtcgatttgtggcttctgcagcagcaccattgtgtccaaggggaagttggtgaatttttcttctattgctccctagtttaaatttaaatttcacataggttaagatttagttacagtattatagttgttaattttaataatattctctaattaaaattagagttttatttactatacttagacaatgaaagttgctttgaaaggtcagcatgaaatctaaattttgactaagaaaatacctaccatactgcacctcatatattcttgcttaggttttcctctttgatttcatttcaggaaggcaatttgctgcatcttctttctcgctagccttacggcacttgtcttatttattatcgatatcatttgtaataaataaatgatatttggcaaaacttgcacataatattagtgaatataatattttatagatagctgaactttttaatttcttgcataaaggaaaatggaaaagaaaaagtactaatgaatgagttcgatttttgtcactagattagatcaacatgcaacatccaacttttccccttaatcccttattataattagaaatctatgactatgatattttgctcggacataactttgcttttaaaattgatgaaatactaaatagatacgtactgattgactttaaaagaatcctcacgaaaaagtgtatccttcatcgataaagaaagcaaattgatgcttcctaatcttcattataaaacagagtaatgagttggaaatgggatcactttccaaattaacaatatgaaaaatcctttagtaaaaaaatggcacataaaagtatcatataaatgatgcgtactaaaagggaacctgacacaactaaattttatatgatggaaaaggagttggcaaggccacaaacggtgcgtctatttctttttcttttaaaaaaataacttttcatgataatttatttattttttaaaaaaatgattacttactttccactttataaaatattattaaaattatcttacgtgattttttctgttcaattttttttgcaatgataatattttttattaaaatttccttttaatcaacaaaagttgttgaaatataagtgtgaatatgaaattttacattaaataaaaataaaaaattaaaatataagatgaatactcacaaacttaaatagtaaggttttgaattggtgtgatgttcggttgcttgtaaaaagtatttttaaaataaaaatacattaaagttttccaaaaatctgttggaacatgaaaagttggcttttttgcgtgaaaagtgctaccaaatgccattaggagcatgccactttaagaacaatgtatctacggaaaagaaaaaagcacgaaatatatttaaaattgattcgtgagtcgttcgtgtagaatatatatccaatctcattctcagagccagatagtttcttcaatttaatttccttcctcgttatgaaactcttctttattcattataataacaaattaaaactctccaagcttcaaatactttctataacgaaccttaaattgtaatatacatgttaagacgtctagttcaactgctttttatctgttgatgatattgacattatatatttagaggttaacatatagtatagagtttaattttttttatattattaatgtaaaaaatattacataaacatcttgtccgttagtaaatgaaatcagtaaatcattgaaagattattattttcccctttagtcttgtgtaggataaatatgatgacattttcaatctttaaatgacttatttattaacaaaatcttaaaggaaataatatgttaatgatttaaacttttgagggattaattagataattaaaattttatgaaatattaatgttaggatggattaaagagtcaaattacaattttctctaaataagttaaacttttttttaaaaatgttatatatacgtactcaatctgacccgattaaggatttgttaaagttaggtcaaattaatcttaataaaattatttttgaaatattaaatatttgtaataaaattatttgaatcattaaatgtaattaagacatatacttaaattaatttcagtattaatcttttttattaaaacatgtgttagtgtaaaagaatccaatcgggcaatagtttacatttcttggtggctgtgggaggatagcaacacccaaacaatgacttatctaaacaaataaggaatcatgctctagactctagactctagaccattcattacttaattatccgttattatcagctagcaaacatccttattttccaaactttgagtgaattgcaagtttgcatatgtcaagacatttagtcgtctcaaagaaaatgaattaatatatgtacaatattcgtttgtttctctttctgaattttttctttaaagaaactaacaaggaatatatagagagatcatcccttttggctagtatatataatatctatgagctggcttacatttgaaattaaatagattataagtagaatttaaatacaagaaattactttctctctcattgtatataattctctttcttttattcacatcacttatcaaatagccaacagtactagtacttttccttcgtatctttctcgtgtatattataagatctattgcataaatcaatatattatactccattcgcttttacactttgtaagcgatctacctggattgggccagtgttgtgttgtaacttgtatgtatacattttagcacttcatgggcatgacgtagactcctgatgtgtacaaaaagctcatccatagctttttctaatttctactaccccaacccaaaccctttttagcttttcttctttttctcttttatttagtgtaatttggcaacgcactttatattctacctacgtttggcgtttatcatatggactttctgccaaagacccatggcatggtttatgattgtactaactattgtgcacttttagctttattcccctttgtatatataaaaagcaccttcacaatttttcctcctccaccccaacctaaaccttcttcactcagaataatattctctctttcctcctctctctaaaattaatggctcgggtacaaagtggccaagctagtgaagggattaagctgtttggaacaacgattacgttgtatggaagagaaagaaaagaagataaaaaaaatagtgaagatgggacagaggagataaagagacctgataagatcataccatgcccaagatgcaagagcatggaaaccaagttttgctacttcaataactacaacgttaatcagcccagacatttctgtaagggctgtcagagatactggacggctggtggggcccttcgcaacgtgccagtaggagccggcaggcgaagggtcaaaccgctgtgccatgaccctgttggatttatggacggtggattcagatccaccgtccaacaacagtttgaaccggaggagaggctgactttggatgaatggcatgttgccaccgtggctcatggtgatttccggcagctttttccatctaaaagacggaggatgagctcaggttgtcaacgtcaaccttgttaagccttcacttctttcattcctttctctctccccttttttcttgtattaacatatatctcccttttgaggttttttaagtaattcttcttaaaaacttaggtatcaattatcattttaaatatagttttgttgttgtttctcaataaaaaaaaataaaacacaaggtataacagataattgatcaaaatataacacttataatcattgttacacgtgttgtatatttaatttattgaaagaaaaaaaaaacaccatttatttatatttatgatattacatgcatctatgttttatccttctatttgctagtctcttctttttcacatatatattctcaaaaaacttgagtgaaataagtaatcctttaataatctcatctaattcacacatctatagggtatttcaaaagaaaaatatgttcccgtgtaccaagcatttgtttgatattttgcttattattaagcatggataggacattgtgtgtgtaattttttatttaaaaagagaaaattaaaaaaaaaaaaaaaacttctatgtgcatggaactccgaaatttcccaacttcatgacccaagtaaagtgataattaatgatccaattatttgattgcgttcctggaaaataagctagcttttttgtatagtcaatattttggcattacatatcccctctgtatattatacatataaaatgggccaaaatatcttatagaattgcttgttactgcagctcagcatgaaagtcaaagaaaatttgttatcatccacgaaatcacagaacatccgaatcagatagaaacaaaggaggcttgaaaaggcagtgacaatctaaagtttatctgattatgaagatgtgaatgctcgaaaaaagacagcaaatgaaccaatcatgttttacaattggagacgtgaacggttcagattatttctcacctacatatatatatatatatatatatatatatatatatatatatatatatatatatatatatatatatacatgctctagttcacacataatctatatagaattaattcaagtacattaaatcctttgctttgacgtgtgatccgcaaaagctacactaattgattgatgtaaacgtaaacgctgaagaaatggtcaatgagaaagaaagggaaaagtttataaaagtaaatacgaaaacttgagagcaaattgtacttttattaattatttattttctctctgctttgaaaattaggggatttatccgtcttttgttcacatcttggttctagaagccggctaaaacgtttaatctacggtatcaattattaagtataagaaaataatttgaagttaaaataaaataaagactccaatttcgtgttttataataataagtgggcagatttattgttttattataataatgatatgtaattaatcggataagttgtaattaacatcaattttgtgagagtagcctcgataatcagtaatttatattccacttgtttcgttaattaaattccttttgtctgaatattactagcatgttaaaccgtttgaaatagattacactatatgttagtaactataaataaaaacgaaatcagaatctaaggtgaacaacacccatcctatcagctaataaaagaggtgctaacaggggaggacgttgttgcaaatgaacataagagtgctgcacactggctccagtaaatgtaatatgccatgtatcttttttagggtaaactatcttttagttcttaatttttttaaaattttatttttttgtctcttaacctttttttttactttcaatttttttttcatccttatagtccttaacaatgactaaaagtaaggacaaatttattataatttttttgtgttaattttttttataagcaaaaatttattaatcctgaaaagcttaattgggaactagatgtactcaaattaagactccaaaacagtgttaaatagtgttattttaatcagaaaaagaaaccttgttattttaagttcactcaacataatataatagtaaaaaccagctcactctccctccctccttttattgtgccatcgcctttgatgggagacatagcatgcttcgatcgacttaacatggttagagttttctgcttttaagaaacagaaattaaagcatgatgataatcaaatcattaagccgaactttttgaaatacgtacggcagcctgttttcgctgtcgtccatgtttacatcagatttttgtagccttaatatcgacatttggtgtaatagtatccgtgtgtgataatttcattttcatttgaaaggatgtaacatgattaaaggaattgtgattctcagaaattcacaatgaatacccgtaattttttttttatcaggaaagtttcatataattataacgggtatactataaaggtcgaacttagtacggtgctttaataattaatacaaaacataagatttaaagaccactaagggatatataatggaatgttaattaataaggttttttttataatatcattattttcataattatattttatttagttaaattgttttgccaaagacattcttcacaacaaaaatttctcttttccataacataatgaaactatatgttttgatctcctacaaattttaaagaacgacttgataaattacgaaagtggtaaaactctccctttcaaaaaaaaaaaaaaaaaactggttatctccggaaatatcattgactgaagaatgagaagactaaaaataattggttctatcggtaatcttttcttttactttccaacttggaatggtctgaaagacactagaaggttgagaatacacacatgacatgtccaatacgatattaaacattggaccagtcatccaaaccccagctagcaacaaaaaagcccacgacgctaggaaagtcccccatatataaataagtacgtacattatgcatgcacatttaacaaaatggttattaatgaatggttagaatggattccaatgatgagttgaatgttagttgttgttgttcacttgaagaagtctaagctcgctctttcaccaagccattgttgttgctgatgctgattctcttcaccagcttaacctcctcttggtgaattgaagtgtgcatggatatgtatggttttcattttgctaaattgttaacaagaacttatatgcaacatgtaccttggcatgtactcgctgaccctggtgaggaactgggcgtgccatgtgtcgcagtaaactctgccctcaaatcccaatagagaagccgaaccaaagaaggacaaaaaacaaagggctgaggctatgacgaaggtagaattgcccattgttaaatcctaatattcttggttcggatggagttatttttattaagaggatgaggattgtgttcattatgcattgggggtgatgattgtaaataacttctattgtctaatcatcacatatatatattagggtgcttgatatttgaacatctttatattttaagcacttcatgattcataaggaccttttatctttttatttttctctttctatcacatcatatcatttatcatatttacatttttctctatcaaggtgtcaaaaagcatttgggtgtctaaatatcttataatttggcatttttagtttacgcaatgcctgtgttttcgttcctgtttttcgggtttacgtacagtatgtctgcagtattgtcgtgaatgtacccataaagattgaacgtgatattaagctccctttaaaaaataaataaaatttgaagttgggatagtttatttaatcacaatcatatcattgggtaaatagtaaaagtccagtcaaccattaagaaaataaagtcgtaaattcacacttctcttttgaaacaatgattcgcataattttaaataaaaattatctatgtaaactgataaaagaatgcaaggtagcatcctcttagaaagaaagtcaaaatgaagaaattcactatgaagaaattcactaaattacagccaaacaccatgcaaatctcaactccagtctccattaacagaaagcacacgataaaaggctcacaaagccctatggtgattttctagagaccaactccatgttctattacaacatcctaatggtaaactatccagagagaaactagccttctcgtatgcactccacaaattccttggccaatacctgcttcacttcattgcaaaatgtaactttaaggtaaaaaagtaaaacccaaataccatcagctaaatgggtattataacctacctatgcatcgtcacctccagcagctcgggcagaatccaccttttgttcctctgctattaaaagaggccatatttaattaaccagggaaatcagagatactgaagttgggttggcaggaccacagaacaaagaaaaatagctaaaataaaatgagaagcaatagcctaatcgaaaacaacaccaaaataagtatagtacacagtaagacacaatcaaaatattacatcaccttttaatactcagcaaactcacctgatcctaaaaatactaaagcagtgggtatggcattcaggccactgtaagtctaacaatgtccaatacttgaatgtgtgccagttgggaggatatgcatgcttttacaatttgcattttggaaacccttttactttttctgacaccaggcagccaaattttcaagttttgtgtgcttctgacccaatatgggcaagcaagcaagaacacagcagccacaatcttcaccacccaagaaccaacctttgatggtttgagttttggttggagacccttcattttaaattatttggtatttactggtttaaactcattggatcaatcaaggctaaacctcttattgctcttaattttttaagttctgcttagctccaaatgtttttatatgctatttttatgtcttatgaaaatgataaatataaatgttttttatacatacaattttctttcatatcctgcggcacccatgtcccaatcttaaagataatgctgaatgcctatgtcatacaaatgtcatgtccaataaccctacccatgttaatgcttcccagttcccacactgatattagagtggaaacaacaactctgaccaaattgttatccaactataaagattaaacaatagaaaaattgtataaactcaattctaagtgcacaagttcatgaagaccatcgatctccgaaattaaatttaattgaatgaaattcatatgcaaacccccaatgattagcttgaaaactcagccatctagtcccagtaagaagagtcacatttaccactaatataactcattatgagaccaatcaaacggaaacaaataaaaaatagcaaatgagacaaatcacactgacaactgagctttaatgagattaaacccattacccctcccttttttcacattactttgacctccctacataagaaatcaggggagatctgtattaatggaagggcacatggtgtaacattttatacaaattaacagaggtttgtgtagagtctaaaaagggaagggtatcgagtgaaattctattaaacctcactacctcagaggatttgagtgtaatactgtaattaaccctaaaagttttcatgtatttttatttacattgcagacaaagtccagcaaacacattgacagagttcattgatttccattaatgaatacctccatcttcagggatgtcagaagtccacagggtgagattgtccctcagaagctgcataattagggtgctgtctttgtaagactcctcgctcagagtatccaactcagagattgcttcatcaaatgcctgcttagcaaggtgacaggccctgagatatgaagagtactgtgttaaatttgttaagcaggggccaactttggcacatagtacacaaagaggtgggcaattaaaaattaataaaataaaataaaagtcatacctttcaggagagttcaaaatttcataataaaagacagagaaattcaaagccaggcccaaacggatgggatgtgtgggtgctaactcagcctcggcagtagtggaagccaactgaaatatttatgaattgttcagataaacatgaacaagcggaaaaatactttggtaactaaacagccaaattcatatcagtgatgccttcatctaaatgaatgtcacaatgccacacatgtaaaactgatcatatgtggtcataagacatatataacgtataataagttgttatgcctgaagaataagcactaccctacatccctactccccccttttcctcggttaatcttttcctcattaacaagtacacaactttagtgataaagaaccattggaatcactccttcaaaattcatatcaccagtgaagagttatggctaacaaatcatctacaagttaacatcaacattaaaaatatattaaaattgatgttgaaggccttccaatgaaatgatttatattacaattacaataatagaatgttgacttgccaattaccttaaaaggtaaattaaaaaaggacacaggccaatatctttgcactttcgtccaggattcatttagcacaaagaaataccaataagcaagatttgtgactgataacaaaggaaagtgaaaacagaagcattttttcttctctggcttcagttagattggcatgcaaagcaaccatatagtccacactccacaacagataccatgaatcagaatcaccaggtttaaattaaaaccacatcagatgcaagaggtcaaaatacaagcagacctgatacgctttcatggaatgatcagcagcctcttttctctcatcaccggacttgaactccgcgaggtaccggtaatagtcccccttcctgcaaccaaaaaaaaaaggcttaaatcaacacacaaaaactctaaattccaactgaagaacaaaaaaatgacaactcagcactcacattttgtagaaaaagacagtaggttcaccagaagagctagagggaataaggtattcatcaataacagtcatgatatcactgcagatattggacaactcagactccaccttctgcatatactcctttatcctcttcacgctcacatcgttccctttagcttcttctttctgttcaatcgaggaaagaatcctccacgaagccctacgagcacccaccacgttcttgtacccaactgaaagaaggttccgctcctccaccgtcaattccacgtttagcttcgccacattcttcattgcttccaccatttctaacacagcataccaaacactcaaaaattctcacaattgtgctcctcgaaattcgaattcaaaatcaacaacgaaaattcaaccgtctaaaccgaaattaaggaacatgattatctaattgaacatctaggtcagcacagtgtggtgactctgaaatctcaacatggaaattaagagaatggattattattattataccttcatagcgttcggcttgttcggcgagcttggcgacgtagacgaagttttcgcgttccttggtggaggccatggaggatctgctactttctctctcctctcactttctcgctctagaaaatttgtgtgtgtactgtcactgtgtgcgttgtgttgtgggtataagaaagttgagagaagggttaggttgtggaggagagggggtattgccacgcgctctgaggagagtgttttccacgcgtttgtcttttggtgaagagtggggagtgagtgatggtcacgttgtgggattgaaagggaggcaaattgattggcgtttggtgggcattgaaatttcaaattcactttttttgtcttttgaataaggggggttgttgttcacacggaaacattaaaaatttatactgtatggtggaatggacaaaatttggttcattatggtcacgttcattgttgaccgttggaaaattttaaataatgtaatggtcaagatttatttcaatttgtacagcctgctacactcaaatttacgtgaaaatggaaaaaataatccctccattatattttggggatgagtttggttgaattttgtacatattttaggtcaaatccaaaccatattaactcaatctataatgaattggatcaggtctctataaggttcaaaaaacttatattgttttaattttaaaagaaaaaaaaatatatatatatatataagatgatttatgggtgattcgagtttgatattattccaaagatattatgttgtgtttaattaaagaagtgttatggagtttttagaatgttattatgatatgaagttgaaatgttgacatcatcaaatagttgatatgagtaccaatatttttattgtttaattttggtttctacattttataagagatatgatacatgtaaaataattcttataataatttatataacatcattttatgtgtctatctctttttattatatcatttattatatttcaaaaaaaattatcttctcattttttccctttatctctctttattataagatttattgtagttgttatatatgtactatttctcatttttcaaactataggattttggttctcatattaaactgacatccaatatttatacaaaaatgttaattttcataagtaaatcaaactcaaataattttattcaaataacttttgcattttctttaccaatatgtacaaatcaatgttacatcgtttgaatttaaatcctatgtattttttcattcatgtatttaattgaatcgtataattcttatctatgatacaaaattgcataaatttattcatgtatcagatacaaagtcatttaaaatttatcttaccatataaatcagtgggtagccaaatggtatcaaattgtaagcttcaaattatgaaatgtatgattctgataacagtcaaaacatgtagaagctcaaatatgttttgcaagtcatgttacacacaaaccatattgtttccattggtatgatggtgtatctttctaaaagctgcatgataatcactgttaagtaagaactaccgtaaggttaagtatgttaataataaaatattgtaattatattaatgactactgtaataaaagaatgttttctcatattgtattgtgtagttaggctgtgttaggtttagggagggaggagagaaatttgatgggttccatgtggaacccacccattttacactttacttcaaaaaaaattctttaatcttcatctcctctattttcattatctaaatcaaacacaggattaggcatgcccaggcaaagtggaattacatactagtacactagttacaagctagcagacaaaattgatggtgcttcttgctgtcttaagctgtcggccacatgagcaattactcctacaccagcattgtgaagccattcatttttcacctgaaatcagacaagcactcgtgttaaaaactctgtaccagtgataccatcatcatccgacagattaaatggatgcagtacatgaatgttgttatgagcaaagaaaggccagaatgctgagtgaaagttgacatcaacttttttccatcccaactgctgtaatccccgaatcatctcatctgttaaaaagattagtggctttagaggaatatcagtgactgaacagataattgatacacatcgtaattttaataagttactctgggcaataataatcaccttctacaatttcatgatattctacagtattctgtgtatttggcgcattttgtgctgcctcctttgcttttactgcttttggaggaaatttaggcccatcagaaggaactgggggacaatattccacatcaaccacgtgcttgtatctatctaaagattttcgaggaggctgccaatacaatagaaaatgttaataccatataaacatattcacattctttaactttcacaattcaagcgtttcccttttcttatattaaacaaaatctcctcctacttttcaaaacagaacctgcacccaaaaaaaaggattgcagcgctttcccctttacccaacatctatagtttcttttccacgcttgcaacacggaagctaacgaacaaactaggatgccagaattaacaccactcacaaatcacaacattttaattgcagtatcaattgaattgatccatcaattttattttactttattcgtttcaaagggatttaatgtagacattcaataacatcagtactgcgtagagcaactgatacagatacaactaagaaccactgccacatccatttcaggatacaggctttcatcttttgcggaaaggctgtgattctgcagtcataggaatttccaattaagtaattatgaaggcacaatagagattaggctactaaagaactgagttaacagtgcaaattataaaaccattctgataactgaaaatgtgaagaactgaagatcccaatcaacagtcaaactagtgaagttcttcaagtgaagtacaattttttttatcgacaaaatattaattgttagtttgtagctttttgttagcagaagggattgaaccgcgacctttccttccttcccttgtttcttaaccacccaaccaaccaaccttatatctctttaagtgaagtacagcagtaaacaaatatttttcaaagaattaaaaaaatgaaatatagtcacattttgatgggagacttaattctctcaaattttacgtatttgtttctttatcacaatgtcccacataaactttgatgtagtagatgcaagttcacttttaaacccttttctgttgaaatttaatacaatgatgatgataaaatctaatacatcattatcatattattatcgggagagggtacatcatattattcttgggagagggtaaggaaatttgatgctctgtaacagttctagtacacaaagtagtaaataataaaaaaaaaaaaaaataataataataataataataacaatctcttttatacttctattattttcattacttgatattattcatcgagacatgaacaaaatttatattagaactcctgataatatttcatacctatagaagatatccagttatcctattagcaattgtagaatttaaattacaacttaccatttaagtgataaatctaagagttaagacaagtaaaacagattataaatggaagacataaacacagttaggatgttaagcataattccaagcatcctacaagattttagtttagtcataatctaagtattaattattaatcattaaacttacatatgctgaatattggagatcagtaaccaacaaaaaataagacaatccaattggagaaatcatcatattcaccttactgagttcagtttccctccttatagaggatgtgcgccaaccaaccatgtctatatgaagttaaaaaattaccaaaattgaggagaaaagaaccataagtttatcattgatatgcctaacaagttgtaaaacagaaaaacatactgagaggatacgatcatatgaaacattagcataaatgatgcgacatctaaatgctccaagtgcagatctacagaaatataaactgtgtaagtattagattacttaattgaaaaagagggataaagactagtacaaatagattccttcacttacaaaaacttcccatcatcagaatcagaagccattctcaataggagaggcggtttgtcaggtttgccatcagtaaggaacaactgactacctgtctggccaacaaaaaaaggagctataggtgcagcaagcttttctaggattgggacacccaacagaaatggaagctgaaatatatgcacagtaaacagtcaaaactcttatggccggcaaattttcagttcaagttgagaaacacaaagagcatcaacaagacatataaacataggaggttggcggaaggatggtttgcattcattcatttgacttaaaaagtcctgtttattagcattattttctaatcacctttttcatgattgtaatataacatttctccagtaaaattaaaattttgttaggacctgtttggtgataatgcaaatcctattctagtattctttccatcggaactgctattagaagagttactggcattctctcctccttccactctttctatttaaaaatttcttctaaggctgtatgcctgtataaaaataaaaatctcaaaatataaatacaagcatgcataattcgatgtaaaaactaagactatgtataagaaactaatttaagaaagagaatagtcaagtcaaatctcagctcagaaaaatagaagggaaaacaaagaaactattagatggataaaaaaagcctcaaacttagtaagctttagcttgagggagtgtcatatcttgcattatcttcaaggtttagtttccctatttcctcattatctcttaattttagttaacaacatatttctttatctcacaatgatttgttcacctaattagccaggattatgattaattaattagtataaatatgagttagagcttcaagttttacaaacatatcaaacacatcaagacattgtaatatcttagttaatacttaatatcaaattattaattcagtgtttcattctcttttatctctcttcctcgctctatccctaagctcataatttcaacatacagcaccaagacaattccaagttttaaaaaagaatgacaacacaaatctgatatatagacatttcaaatggaggtcatcagctaatcgctttccagctccatcaatcccagaaaatgtcttagtgtaagtatttgatgaacttactgcaaacaacaaacaattgttaaggacttcagctagacaaataattttacattcacggatgaggcactcatgcaatacccaagaaaatcttcacagcattttatatatatatatatatatatatatatatatatatatatatatatatatcttaggaagcttaagcttacttctttccaaatgatacaaatagacttttttcagcattaacttgaaagaaagtgaaaagaacagttaaggctgttcagcacaagagtgagttaaattttgcatgtttacttaaacctgtaaagcagattatgtttgagctggttaaggtatctcagtcagttgcctccatagaatcatagatcattgaacatcccaaaagtaacgatttaatttaaagaaactaagaacactatgattcaacaatcaaacattagataaaaagctcttcgaaagtgagcttgtatgtaaaatacacaaacaagggtgcatccaccattgatttaatttcaactacatcacaatcttaacacactaaactaatttgaaccactttaaccctctaaaatttaagggtggatacacccttgtacagtttacaaacaagctcaatttacagacctagaggagcattatgcaatataacatagagaaccactagttaaaaatatctaaccataaattaaaaaggtttttccaaggcgccttttcaactctgcttctgcataagtccagtcccctgtgcggtatcaatcaaaacatcagtacaactttgtatgagactaaactacagaccaacataaagaagcggacagatgagacatatgataaacaaccatgtgcccaaattttgcaatgaaaccaacttgtaaaagtgtaaacaatgaaacgaatactttactttattcacattcataggctaaattgtgagagtatgaattgaatcagatttataattgacaggcaaactggaaaggtacccactaatcataaacaggatgaaaatcataatcctttccaactgaacttcaatatagtagctaactttaaaagcattaagcacgtaaacttcacttttcacccatactcccatatagctcaaaacaagcatcactcatattttaacacaaaataattcaaacaattttttattctctcaataaatatatcacatacctagccaagataccatgaacaagaacaaggagatgatcagggtcgttcttcaaattccctatgctagcaatagaatttccaagagtgacagtactcatagcttgagctctaaggccctggtgtctctgtccactgtttgtacctgcaaaaattcatctaccagccttaatgaaaattaaaacttaaacatatatttgcaccaatattaatactgttgttagaatattgggattattagtctttgtgtttgtaggcttagactagtactagtactagtacttgccgtaatcattagtaggtttataggagtattaggttgtagtactttatcacatctatcaaacttatattcattcagtaaacaaatatgcacaaccatctttctctcttttctctcctccctatcaaaaccttattccaacaatggtcttttacctagaaaactacaaaaagaaaatagacaaaagagtgacaaagaaagaggatggagaaagcaagccaagtaggaaataattgtaaaaaatgttgcccaatgcaaaaaggtttcccgacattatggagccttgaggcggcatatgtatgaatcttgttgaggaaaagatgatctggccctatagttttaatggataacaaacaaagcaaattgatgaataagaatattatgtgctaacatgttctctctaagcatacagggactaaaaattggcaatccatctgattgaaagatcatgaagatcatcctgagactatgttcaataaccgttggaagacttcattgtcctatgatcatttcaccctttaacagcaagtctgaagattatgtcgtcttgagaacattatagtcgaacaagagacaaaaagcatcaaggtcaaactctagtaacgcaacattcttgagcacaacgtctgatgcaaaaggagaaaaaacaatgtagcctttcagataatggaaagttctaccttctcaggtctcttgtcaactccagaggaacaaaagcaacttttgcaatctaaagatagagcaacaacaatcaaatcatcaaatgaacaataaacaaatacaatatttaaattttgtagaatctaagtaagcccatttatgaaaaagaattgatggcattggtgtaagccatccagcattggagtccatactaataggcaggaaagttacagttttaacctaccagaaactcttgaaacacattacagctaagaaaaacaacccaaaatcagcaaaactggctggctaagccactgggttatgattttgacataatctattggcctagacctggacaggagaattgggccacagatgcactatcacaaatggaggaaggggaattgatagctctcatagggccaattttgctggatgcagaaaaaattcaacaagcaatgaatattgatcctcacttgagtaaacttatcacttcatttcaggaaaaaacaaatgagaaaccagggtattctttagatcaggaatgcctattctataaggggagaattgttataacagctaactaagaatggacatcagttctgctacagtgctacctgaatttcattcaaacccagtaggggtcattcaggggcttataggagctataggcatttggaagcaaaactattttggcaaaggacgatggctatagtaactaaatttgtagtggaacaccctatctgctagcagaacaagtatcaagccgcatctccattctccagcacgtctactcaaaacctcacctataccaaaggctataatgggataatgtggggatggattttatcacaagactacctcaatctaaggggtatgatgcaatcctaattgttttggactggccatccaagtgtggtcacttcatcttattgaaacacccctttttggctcaaatggtggcttagttgtttgctaaggaggttgctcatctccatggagtgacaacctccatagtaagagatccggatccaccttttataaacaagttcttatctgaattattttgcctaaagggtactgctcttcaaatgatctcagcacatcaccctataacagatggtcaaactaaagtactaactagggactagagacttactcacactattttgcttatggtagcctaagaagtgggcaaattggttgcattgggctgagtactggtataatatctatcaactttcagattgctgctggttgcattcgatttgaactgacccacggcagaaaaccacccacactatctacctagggaatgcttggttgcatgtagccaatggaagaatgttttgcttatgcatggtgcttgactttacactctctccactgggaacacaagtgatttcttattggctaatgttaggcaaccaaacctgtattttgccttaattaaggacaataagttagtggtatgcaattgccaattgcacatataaaataagacatatagacccgtaatatcaactgatattctcaataaactactaaaatcaaatttatacttgaattcaagttaaatgccttctgttgcatttatcgagtctagggtgaaaagtccatatagtatcccaatcctgcatacaataccaacgaaaatagtatgttagtttttattacctagcttcacgccagtggggttcaaaggtttgacagggttgattgcagctattttactagtttttaaggttagataggtgtgatcaataagcttggaactcacagggtattaattgtcttattactaagattttcatacactcctctttagtttcagtcacaacctcttaactctggtataagtagtatgcgtatcctttcatgtgattccttctatcaatcaaaatagagtccctattcatagcatagacaaatgaagtttctagaactagatgaacgttgaaaacttccaaagtggtgcataactaccaacgagctagctagctgcccagtatcaaaatacaaaatcagctaataaataaattggtcttgaagtcacttcccaattttccattaatcaaagaaggtggaccatacagcgccttgggccagtaccaggtcacccaacatgcacagtgtaataccgattttgcccttctcaaaatccgtaagttgcatatcgacatacaccattagatttcttacggatcaccgatctttatgagtcatacggattggcaatccatatgactcatacggatcgccgatccgtatgattcatatgaattgacaatccatatgactcttacggattgccgatccatatgagggtaaaattggaaataaaaaatatgtaggtgtattagaaaaagcgctggtgtaggaagcagaactcaccctctagcccaacagtataaatctggcccactatgtaagtagcttaagaagggggatgtagtttactgcatcacttttttggcttccggaatggccaatcatccgaaaggtaaaaaaacattccggaaagggtgcaaagaagcaacttgaaggtacaggaagcaatagcctaagaaggattttcagtttttacactagtcctaagtagtattttttatttttccttgtgtctacacagaggtggacccccactgctctcccacgtgtaaaccaacctctcgtgtgcacacaagaacaggaggcgaagagtaaaatgacagaacgaaaattgaaataatcaacgctcgatgtttaattggccaatgaaacaaaaacgatcttaattaagagaaacgtaagttggagcactaacaaatccacaatcaaatcagtttaaaaaaaaaatagaagattaggaaattaagaagtaaggggaaataaaaaaaaaattaccagaagagaaagtagaactggagggtgaggaggaagaagctatatgggcttgttgtgaggctcccttgttgttgcgattggaaattctaggcgagtaggcacagcgcgattgaatgaagggtgccgttgccatatgtgtgatgtatgataataaatttatatagggaaaaccaatccttaattgaaggcacaagtgttgttatcttctggaccaaatcacaacgctgcacttttgagtcactcagaactcggaatgggcaatggattcgcgggtgggaacaagccatctgttaatttctgattcatgtaaacgacacgcaacgcaacggaagcagacatacagcgtggcgtcaccgcaaaatcaccactcacccgtggggttgggtttgctttgctttggcgcctttatttatttatttatttttgtaaataatcaaattgttccttaaggctttgtttgggagttaggaggggaggagaaggaaagagatttaaggggaagggaggggaaggaaagggaagaaaataagggaagtttctttctccttgtttgggagttaaaaatatattaagagaggaaaatagaaagttaataagaaatttttacaatttttttcttatttaaaaaattaatacattatatattttacactgattagggtaggatagtaattttattaatactgactggtataataataattttaattactttttcttctaaaaaccctccaaataggggggacaacaattttaaggctttggaggctttggaggagttttgaaaatcctcaaatcctttccctcaaaaattaaaactctcaaacaaaaagatgtctctacataaatttttcccttccctcccttcccctctaacattcctctcccacctaaaggtccgaggcattccttgaaggatggaaaattcatatttactattctctgaaaatatgcaaaacaagtagataaactggtcaatcacatattaattcttaggctgataaaatttataatttaatattatttattaaaaaatataatttattgtcaaatttgtctttaatagcttaaagataaaattaagtctaaacttaattttaaactcttttttaatcattatatatgaactgatcgagaaaagtcatatcgtgaatgattttctagttaattatgtatgcaattcaagttgacaagaaaagggacaacttatagttgtaagaattccaatattcaagtcaacatgaaatcttagataagatggttagagattaggcctacctagagtgcaaaactctagacttctatttatatataagataggtttagataatgtgacacttcttcatgataaatacatttatcttttggtggataataagaattatttgaataataccttactacttgatatagaagctatattgttaattttgttgcaaggatatatcggcttttcatgcaattgagctctaattgggaaacctagctaggataaaacaagtctagaactgtaatccccaagtgatcgagtagctcgtgatatcctaaggtacgtgttaacttatggagatgtattttgacttgggacctaaatcaatcaaccctataccagatatgatcaaatactgaatataactatctagctagcaaaaattcaaatcacatttctactagaataaaccgtggtttggtatttttccccactcaatttccacttcaagtatctatacatataaatgtgcaagggatatttattatggtattgccaatgcataatacaactttctaagtagcccacgtttattgacaggaaaaagtcaagaagttcatgcgataaatcaatgtgcttcacattatagagcaagcatgagggttgtcatcactgaacatggacatggccttctcatcaataattgctgcaccaattggcttgtggtagtagccaaagtcttcaccataactatagccatgcttgtaataattgtaagaagaggagggcttggcagaagcaaagtaattaccattgccgtaatggcgagccaaggcatggtattctgggttgtatggatacggccacagttctgccctcctaccagtcttcctcactgttttcaataccttcttttggtctgcccaacccatcacagttaccttttgcatcctcatgtctatatcaacatcatcaactcctgatgatacaattcgtttaaaccaataggtaagatggatgtagaatttgaacttgccacactacaacgataaatgtttgaagagcactaacataagacttgtatacacactattttataatttttttacaggaaaaaacgaattgggtccatttgaactcttgaattatataaaaccagttatatatatacatatatgtgtgtatttatacactaaattttagaaaattcattcaataataggtatatgcaatatattttatatcagtttcttttcaactataaatatttttattcctcaaagcttcacatataaaatcacacaatattagtactcttccataatgtcaaaattaataaatcgttgagccaacgctagctatgtgcaagattgaatacagaattaatttgaattttaatacacacacacaaatagggtctaattatacttttctttctatattaaagaagcaaaaagagagaaaaaaaatcgtcaattatgctcaatgacattatgttgtcaatgcgaaataaattaaatctgatatagcgattgatatgatacgtacgtggataaagtagaacttatatataatctgctatttttggtttttggtttcaccctctttcagtagaatggaaatctattgttttttaattttaagtttgttttgttttatttgtaaagtttatcaaatataaaatagaacttatgtatatgatcttctattccgttttagcacaattattactaaacacgaatataattatatgattttaataaaaacaatcgcacacaaagttaaggcttttatgtaccacgcaattttttgagagctttctttatcttggtctcgcaacctggacagtccatgtgcacacacatctctactatctacaaaacacaagaaaagaaaaatgaagaatagttaaacataaataaaccatatgaattattattaatacaaaggccacatgtagttgaatatatgtacaatgcatgcacgtaacataatgcagattttgtttgagcttagtcatctctaatactattgatgatttagtgtatttaacattttaatacgcagtagctagctcaatcgaacttgaaacctcttatttcaaattaataaagttgaatatcaatcaagagtatgcttgtgtaattaagggttttttttaacattttcagaagttgttacttctaacttcttataaaagtacttaaatacctttttctttaagatttttttaaatttatataattattacaatttcttaagcatgtcttttaattaaaagattcaaaataaatgttaacatacggtcccgccttaagcttataatcaaggaagatatagaacctatttacaccttgataatgaaaataaaaaggaaatatattgtagtcatgtgtgcatgatgatgtgcaaaagataataacaaggaagttcacaagaagacagtagagagacataattcaagagcagtggcaaaataacaaaatagtgtttctaaattctaaccgtcattatttcctaaagattgcaatgagcttctagctataaggatgaaagacagcaagattatttgttggtggcaagattgatgaacctttatattgtttgcgtattatatatagtcaggaaaaccagcaagattgagaatggaacataattaagaatataaatatacttatattcacgcgtagtcccaggggatggattttctttctcttttaataatttgttgctaataaacaaaacttgaatgtgtagacaaattggaaactgaacagcaaatgctcagaaattgggaggagcgccgttgatagaaacaaaccttttatagcgcagtagtgtatatactatatagagagaaaagctatggacggcgaaatatatgtcaccagtcaccaaaaagaaaaagacacacacatatacatacatatatatttttatatatattataacatattaacatgaacgccattttaacattttaatggaaccttatcacgtatgaatttgattgaaaatactacaattttttaactattttgcaacttcaaaatggcactgcgtggtctttttaatttttattgagtttcttcgtaggtgttacttttatagaagctgactatgaaactagctacgacagcatgatatatatttctaagtgacaagctccaaaattgaagtttagaagttaatgattaattattaataaacaaatcaaagggagctgccgtgtttgtgacttccttgcacatattatgaaaagaaatctgctgagaagatcatgtgttaaaaatatatgtgaaaacactagttgatatagctgacgaagtctcttctactagaaatattaatatgacaattttttagtacgcatgtattgcattttcaaaacttaaaaataattattaaccatattttcattataattaaattattgtacttctatgtttattattttcactaaacatattatttctattattgggatttaaataaattagaattatcatttttactatatttagaggataaatatttttcaatcaagaatatatgattattctcatcctcccccacccccaccacacaaaaaaaatgtcttttccatattataaaaaacatcttttattcctattaatttatttaataatttaataaaaaaaactttataatgatgctaacattaggtacgttggtttgagtataactgtattcaaattgtttcctcttgaatttaaatataatagataaaaaaataattgttgacaaaataagttatgagcatttcgcacttataacataataacaaaaaaaaaaattatgatgagtgtgattcaaacattattcttgtggagcaagtgaaccaaaatatagcacgcatacagatcttttcatacacatgataagtggtgttaaaattttctttctattttttcttataattattaaattaaaatattgcacttataacataatactttttaaccttttaaaataaagataaaagacctaaaataacattggaaaaattatcaagaaaatctcaatgaattcattgtttgatgagatctttaaccaaattcaacgctaattgtagttgtacttccgtcttccactaatttccagtgtattttcaaatttgatttttaataaaaaaaacgttgtacttatttttacctttaaccattagatttaacaagacaccaacaaaatactaattaaaggaaaaacttgcaacaaataagaaagaaaaaagttacacaaacacccaaacagtgtttatccctccattagccacccctttaaatatattattttattatttcaactaccacccgtttattatttcaggtgttgggtgggggtatgatacacgtatgggtgtacgtgtatcaatgctcaataagaaatatggttgaaaaaaaaatacttcccacctatggaaaaaaattacaaaacttgatgtctgaatgctgtctgagataggattacttattctagttttggacatctccacaagtttctcaatgacatccatgctcaaatggaattatactattctgctccagccgcatccaatcctatattatatcactaatacaatgtttgtatgcaaattcccgcttcagtcgcatgattaattaaacttaaaaatgatcagctccattggtgtttagctgccaaaaagggctacaacacacccaacaaattattcaatatgctcaaagcttgaattcaacacaaaatgtccaaattaccatgggggaactacaacccgtaggatttctgcaatttctgaacctggttgaggaaaatccatgtcatctgcataagcaattaatacaatcatatatcagaacataaacttaacaaaccccttgaaggtaacattaattcaaataaacaaaagcaaaggaatcattatagaataataccatgacatgaggagcaatcctaacacaatagacagggaatccggtgtaaaatttgaacggtcctcctgctttgaaggttttgatagcacaatcaacagagccagtgtatggatattttccatcagcatcaggttgcatcttctggatctgggtcttcacatagtcaaatggcaaactgcaagctgctgcgaaaaatccagaaacggaacttgcacctaaagaagaacaaatgttagttggtaacagtgagaataaaatctttggcattatattaacctatgtagcttatggcacaatccatatgaaatattagatttcccttacaaaactttaactcagacaaggaattatgacatgtgtaatattatgcaagcttccataatttcttaaaacaacaaagagcaatcaagtctcgcaatttgttcaaaaaaatagaaatagaaagaaacatatctgcttactgcttagacattgtacgagagccaaattgcataatacttattaagaatgagatgctaaacttagaccattttcaatgcttggctaaattagtcatccacttgaagagtttgcccaaatcaacattggtgcattaacccgaaaatcctaccattaacatggttagtttcaaaagagtaaactactctgccaataacatacagaaatattgcaattggtctctcttattttccctgaattgcataaacttttcaaaaatgcactgatatttgtcttctaccgcatactagaagtgactaattgataagaatcagttgtaaaaaaaaggagacatcaacaataaattcagttcctacatgatagaaaacagaacaaggaaagactatggacctgtttgattcccttctcacaggtttatttttaaaactgttttataaaacaattccacactgagcaattaatttctcatctaaaatctatgaagttatgaaaattgtttcccaaacaagtcttttagaaagcaaaaagcagaaacagctgtgagatttttctcattcccttcttttttcttcaagcactctgttcaagtgctcagaggacaaacttctagaaaatagaaatgtgctcaggggtcaaacaaaatttagaaaacataaatctgtttttgtaaacagtaaaaacaaggccaactattgtatctgttggcaatttttgagcttttggcaaataaaatagtggatgtggaagacaacccaactattgtaaggtttgactaaatcattttgtttcagtgtttttaagtctacaaggggatcgatgggagtaaagcatagacttctgaaacatcagcagaaaattttaaataaggtgcactaaaaataatttgggcaaaatctttagtaaggtgtagtacagttgagcatacttgtctcacaaataccatcacaatgtataaagctaaagccaacaaatacaaataaaataatttgacagtagtaaaatggttacttacctagaacagtagcagcttcaccaagaccaacagaatccctgaagaactcaacactttgatcataagatgcaagcatgcccatgttcaatgccatggctcttacaacagtaggcccagcacctttccaaagtgccaaaaccccttcatcagcagtaattcgatagagtgcatggaaggcattagtgtaatttcggcgctgagcagcaggtaatgttgcatcagcctgcatccgaatgagtgccaaatctgctggactaccaacagttgctccgatagcaccagcagtcagcccacatagagctttctgatagagtggcaggggcttcccatcattagcctcaatagctttggccgtcaagattctaaaaagcattaaaaccattaagttagtcacaatcacacaaaacaattccttagaaaccatgaaagatgataagctttccagttatcaaagctatcatattataaacaatggaaaacagcaaaggaatagcagaaagccttagaaattaagactacaaaatttctacttttgattaatcaagagtgatgaacatagacgtaacaactcacttaaatgatccaagacgggcagtggtgtatgtagcctgcctgagtaatccagcagatagaccctacaagaaatgatacattttagacaccattagataataaaacgcatgtccaaaactcaaactggaataaaacagtcactcatcaataagaaaccccttcataactcataatccaaagcaacaacgtctacaaaaatccacttccacttgcagatctatagccaggtaattaaaacaagtgaaacaaacacaacacacaacatctggccataccaaaacccataacaaattggaatcatcaatacaccaaaaatcatcccaccaataaagcaaggatccataattagagaaaatgaaacaacataaaaaacaagagcatgggaagagatgtaaaaaccttatagaaggcagcaacaccctcattcttaagcatggtggaagtgacctgcgcagctgatccttgcccaagttgaatcctcacctacaccaccaaaaccatcaaaccccacaacacacaaaaacagagatcgtacacaaaaacccacagatctgaatccagcaacaaaaatcgaacagacccagaagtccatttggaggaatagatacaaaaaggacggacaggtaaaaacttgacgtcaccttgatcatatcgatgggttgaatgacgcaagtggcgagcatgccggagactccgccattgacgaaaggcttgatggtggaccacacgccggaagcagcaggcttggccttcttctcgtctcccattgttgtgttgttagtgagatagaaaaaagggtttagcgaagaagaaaaacagagggagaaggagaaggaagtgcactagtggtggtgcgtgctcttgggagctgagagtaggtattgggcgagacctaaagagagagaccacacactacttagaagttagaagcgcatttatatgttgtaaacctcgcctatgttgttgttgttcttgttctctccctcccacaacaaatgagatagaattaatgtggcatttctttttttgttattaaccttggcattcctgtaatttacgaaactagttttcggccaatgagatccatgttcgtcatttattttatttatttactcttttttattggagataatcgtgatccttgccacataaaagtgactgcttattttctagcaggatgtaattattttaaggtaatatttggtataagaactatttttgtgcgttatcagtgtacaaaattttatattctcaattaattagaaactattattgttacgatggtcaataaattttatatagtaatttgtaaattgataaaaatataaaaagaaaaattacactacccatgtataaacgatttacttgacatctagaaagcgtttagtacaaaatcaaattttagtttttttaaatgtttgtttttcatgtttgatttgtttttttttaaaataacatttttatgagaaattgtttggctacattttccataaaatatttcaatctaacttttctaagttaaaaaaataagttttatcacaataaaatatcatgttactcttataaaataatttaatttaatgttgtaaaaaattaaagtttgcggtaaaaataatgttgatcttttattttctataagaatatttatgattaactaaacaaatttaattgtttttaggacttataattcttaagaatgatatttttgaatatgaaaaaaaatttaattttaccaaatgcctccttacataaaaataatatgagaataattttttagtttaataaatacatattatcaaagtaaaaaaaatcttatattgtaaactaattaaaataattaattaattttaaaatacttattattaaaataaataaagttacatatatggtaatttataattggatgtactactttcatgttttataaagaaaaataaaagtacctttcaggcataaaacgtttttgagaatactaatttgtgaataaatgagaatgacaaattcttatttttattggtgataataattttttgtgatattttgttcgtcaaaatactaaattttctcatgataattaattataaacctattattcatatgaaagataagtaataattagatttaatttctgtaaacaaaagtagatatatttcatattttttaaaaatatatttattgatgatgccacctaattgaaacaagtagaagtttaaaaaatatggaatgcattttagtttttagttgttgccaatagccttttgtgatatttatatacttaattatataagcaagtttaagttatttttaaataaaaatgtttatatttgacattttcagtggtcttaatttatgatgccaaaaaaaatatttgataattttttgaatcagcactatgttatattggtgtaaattactacaccgatccgtttgataatttcttactacgttattaacaagagatatataaatatgacatttattcgttaaaagtatgcttgtaatatattttagttagatttcaaatatcttccaaagccactgaaattatatgtagtattagatatcacatcctttttttctgaagattagttatcatatccttagggatagaaacgaattttgggtgcgacggtctaataagtctaattgacgatagcctcttaaaaatctatattcaaacattttaaggcagtagattcttcaatattgaagacctgtctgataggatggtacatatgttttatattttaaaattgttatgtatggtaattaaaggttattaacttttataatattatcttaatagtcataccttagattattttttattaattcacaatataaaaaatttcatactaataatatatgaaatatgattcctcatggtggctcataccgcagttttggttacgtaatatgaaaattacaattgtaaacaagttggtgcatatgatgtgcggttctttctgtattagacgtgtatatctatctatctatctatatctagagatatctatctagatatagatagatagatatacacgaaagaattgcatatatatatatatatatatatatatatatatatatatattgtatgataaaacggaaaaggaagaatgctctggagtctggcctctccatcaagtgtgaagtggggttggtttctttgggatcttggaacgaatgagctttacgtaggtctagtaaaaactataaagtaagcaaggaccatcgcagcacatgtccatggggatgtcaattccttatcttttgctttagttgcgataaaacgagagatacacccccttgcctttgttttcagtatgtcaaaattttaaaatcgattttgatgatcaaattaattgcaaatgaaaatcggtaatctatagaccggatgatgtatccaagaaagcttatggtcgataatatagcaaattaacaactataatactctactcatcgatcatattcattatattaagaaattctagctcaagtgattaaataaaataagtaaattattgatttattgtaaattttttaataattattttttattcctactaataaaaaaaatcttctccactatagtagtattttattagcaattaccgattaaatattggcatggagctttccaaatttgcatgcatttgctatgcataataatcatgtgaacgacaataggatacggattataagtagagaccgacccaggtttaagccaatggggcaattgcccccctaaaataataagttctcttaatatgttctatcagaaaatcaaaatttaaaaactctccattcatccttaattttataaaataaataaaatttataatgtcatttttcccctcctatcatttttttctggttcagttcctgattacaagagtaaaataaggaatgcatgaaggacatttgctgtatctattatctaatgttggtgctccacacgaggacatgtgattccatgagaggtgccaacttgtggaattggttggttctgctgtggatataaaactcgtggaagctcaaaaataccaatttctcccttaggatttgtcgttgaatggcgattatcacatcaaacttttgtccccttcccacctttttgcactcctttgtgttttaatgtgaaaagcttggtttcgttcggtctttaattaaggacaaaaaataaataaacatgtttcaaattttaattatatacaaggttttaaagagaatgaaatgtatcttattctaaagccaaatgagtctcaaggtaaaacatttaagattcaatcttcgcgatatatgtaacaccaaatttggatctagacgggcattgcaacttgtaaaccacacccatcactctgttggcgaaggtggcagcataacaacacttttttatgtttgaatttatatttttttaatgaagacgttgtatatttttaataatttgttatgaatgattaagaagatgtaaacaaaagtattaaataaagatcacattgttttccaatgttttaaatttatttgttaaagattctttttgaacgaaaattggcgtaaaagaaagagaataaattgtatgtttcctttaaagcctgcttagaatagaatccaaaacaaataagccactccttgtttgtttttattaatattattttttagttccataaacatcaccatattcagttatatgcatcgcttgaaagccaagaggaccaccccaccaaggaatacgaatgattatgatttatgaccaatgagtggagctagagtcgaacgtttcttgtgaatggctattcacaaaatataattctacaattttaaaaaaccaaaaattctgagtttaacttccatacttgtgcagaaacttctacattattaatcgatgaaaaatatgctacatgtgacgtttaaaacaattgttgtaaaaataataaatttatcatatatgatattttttatgattaaatgataacataattttatattattagtgtatagaccatttactcaagggacttcgaactccatagctaatgcgtagaagataaaacaatgaatatgtatactcactattccacttaaaatttctaaatttggtagtgctcgattgttttaacttttattcagtactttatattttttatacataaaacaattgctgtcaattttgtttgtttcattacaaagacacgcaatcttcaggttgtccaagggctatatgacattcttgaagattaataacgagtatacaaggccttatcatctatccacgcaggcttctttgcattgtaatagaaaaatgcaatcatctgaaccagctcatccgcagttcggagttctgcaaaggtacaagtaacagtgcatcattataaaagaagagcctagacaaagagaatgtgcatttctttgtaccaaccaaacaaaactctggtatacataaaaaaagtgaagagaaagatcaatgatctcacctttctccctgtacacgaccctgtgaccccttaaaaataaaatttgaggacattctctaactttcagggcataagccaaatctctctcgatattgatatctatcttaaccgcctataaataggaaattcaatatgttacacggtattctaaaatagtatcacttgtaacatttgtatagtgataattaaataacagaaaatataattttataaatctaacaagtggttaatcagaaggaagatttgcattgatggaaagcaacatcattcttttcagtttaggcatgtataaatagatgaaagtgcagttttatcacatgaaatagaaaaatgatcgtacccggggaggcaaccgatctttagctctccaatatacctttactgctttctctaactctttcaaatttttccagttatcagatgccctgtggaaaaaacaaaatcaaacaccaaactagaggctaaaattagctataaataactaacattatttgaaatcgctaccaacgtatcattcattatatatccgatgtggcattttctatattcaatttttacaaacaaaaagaaacatttaattaaatacagaatttcttatcgaaatacaatttttttatgcatttccacactcatgtgcattatcacgtgcctctgaataaaccaaaattatcttctgtgaagaaatgacatcttaaaagaagtaggtatagcaaaccattgccagcagaaaacctttcaaaaaattgaattttgtgtatagaagaagaaactccattagagacgagaatcaaattataaactaaaaatggatacatacaatttctcacttctgaaagaaagttcagttttacttctataatttcaatcggggaaaaagaaaatcaaatcaaatgtgaaaactgttttcttgggccccaattcaaatgcatgtggagaaaaagtatccaaagttaaccaaccagcaagttgtcccaccccatgtttccaaatgctgtctatgataagggaagtataggtgctgagcgctattaggtttatcagtactcagagaagttaaaaaaggaagcttctaaaaaagatgaagaacataacttaagaagtttgattcattttctcccatgtccattttattttcttctcttaagagtgctgttgagaagtttttaccatctcattcagttttaccatttgttccatcccactcttgtcttaagtattaccaataattctattctctttagctccagcaaatccatacccaaaaagcatttcaagtaaaacccaaaacagtagaaattacctgttatagcgttcaaagacaaggacaattaaagggctgggatggaaagcaaaactctcccactccaaacagttgatctcttgcacccagttgtcatcaatctccccttcccagtcaatttcatacccatcttctcccaccacattcttgattggatgctgctcaaaatactcggaagctcttattccccacccaacatctgcatccaaaggccaacttttactctcttcctcaatcaccatcttatttcttaagccttcaccgccatcttcctcttcatcatcattgacatcgtccttatcaccactttcagatttagaactgtcatcatccctctccttcattatgttctcatgattctccaaagcatccttgttttgttcccgaattgcagcaaacgtgcgctcgagcgaatcgcgtacaaaatcttccactgccacggcttcacttctgcgaccacgcttcggcttcctgggaatcgtagtggggaatgtctctgctgaacttttatcaccattgctggataccacatctttagattggccacttctgcttcttgccttaggccttgctctttggttcgaactagcttcaggttccggaggttcaggattgggttttgaatgagactttctagaaacagagcatgatatggactttacaatgcggtggctagatacaggggaataatgagaaaagctgtgagcacattccaacataggattttgaatgttaagtgatgacaatggatgcaaactagcatcacaaaaaggtgagaagggtctaggtaagacagtggtttgaagaaacaacattttcataacttcacaacgttgtcaacggaaattcatctatttatcttgaatgaggagtctctctctctgttcagcagcgtcacacaggagaagagtgtcagaacattatcgagcaaagaaacagagaagttaggaaaacattaaattaaaagaaatggaaactaatggttggattattttatcaaacagctggtgctcaggagtcaaaacacacgggataacccaaagtttaactaaatgaacctttactttctttgttttggggttccgaaatagtgagcgctatccactgaaacgagttaagtaggggtgtgtatgtgtgtagttgcctttcttctcctcgtcactctgtcacagtgtcacttctggtaactacggtactctctgagttttgaatggtgcaggaagaaaatctctttcatgatttgtgttttttttgtcaaggctgccaagtggactttactattcgcaacccctcattgctttttcaacccccaagagtttgtatctctgttattgtgtagttgagggtctatacacaaccaaaacaaattttttctgttgtgtaatactttttttgcaccctctactaatctttaatagtacactaaaacttcatttttttaacttggtagatattttttagtcaccaataacctccgatgtctttttctattttaattacctagcttgtctttagtacggcgtcattaatttttgcataattttgtaatattgatctgaaattacttaaattagaaacatgcgatatcacatctcaaatgtttacttctaaatctctttcctcttgtttcttgctaaaaagtcgatgcacataatctttttactttaactcaagggaaaaacttttgctaacaatgtccatctttggaactaaagttttgagttaacctctttcttcaattcctcaataaaaaatatatcatcttttaaaagcatgcattaaaaaaattcatgtaaaaaaatgtataagtaattaataatttaacctaactaaaaatattgaataatgataaaatcatgtatctatggaaaaaaaatgtcttcattttaaagaaaagaaagactttatttttattgtataaaggtgaattgcgtatagagcattgaaaatcacccagatatacgtattttttgctacatgtacttaaaaatatttatattcttacatctcttatattttcacccaccaccggtagtacttcttttcttagcttttgcctttgattacacaccaaggacttcagctaataaatagcctatgctatattacagtgaaaatctgcataccaattccaaggactatctatcatgttcatccctcaaaccaaataatccttcacttatttttccacatgaagatgctgaatgttgggagtctgctaggcgctgatcttttgagaattaatggtttcactaaagtctgctctgaactgatagctcacgcttcatttgatccctcattactctcctcagtattttgttggaagatgttcgaggaaagtctggcacaattttaacaaggcttacctgttatgtaatgaaaagagtttgtgaatgtattagtgaactgtatcgtatcatcccaagtcatgtcagttttcacaaattaataaaccacaatcaattcaatattgtttaaaaccaactaagagtcagaccttaaacaaagggttaaggttgctttgaatagctttagtgaatttcatctttagagtttctgcacttgaattgtatccttcctttaaaactacaaatataaccagttgttctgggcctctatttgcaatcgcaacaccaatggcagctgtctccaaaatgcattcatccgctccatcacagacacgctcaatttctacagaacttgtctgcatatcagaaacagaaatttcaaggttaaaagttaaaacgagtccaggaatggcaaaataagagcaacaatcatgtgagttttagaatatctgatatatctatgatcagttagagagtattacttactaagttgtacttgtagatcatggacatgaaagctatgatagaattcttacaccatatgtgtaagaatggaagataaagcattcttaaatgattttaagaatttctgaagaacatcagttaagagtatcttccattcttaccaagtttatgcagaccatggacatgaaagatatagtattctcacactattaagtctaacatgcagacctatccttcaaaagcttcatcccccatcctaggaccatcatttcacattacttcacccatagtaattcccccttctagttctacactgactggagtgattagttaaattttcttttcttaacagaaagttattacagttgttttcagtgtttctaattgttgccaagctggaatggattgttaagctggaacgattgtagcacatagtcaagtgtagcagtgttggttatggtttatctttttttgtttctttttttcttgtaatttatgttgcacctttacaaatggaaagttgatcagatatcgtgaatcaaggaatgaaaaattttctcttttttattttttttctacactcttccgttttttctttggtcatcagagctatattcttctactgcttccctggttgatagctttgattactatcagaatcttcgaaattcctgattagcttctaattcagctgtttccatgtaataatgatacctttattccaccaagattcatggtgtcatcagccctcccttgcacaatgatatatccgtcaactgttctttttattatatctccatgcctcctaagaatctgttaataaatttacaatgatagacaattagacatgacaaattataaccatagtaatagaatgagtagttaaaattacaaatttagtttattctattattatgtagtttacaaagaagggattatttaaaaatctttaatcgaggtcatacggatttacagtattttggacatcaaaagcttgcatgggtcttggcggcatttgataaccaactataaaacagacaaagttcagaatgaaagatgttcctatattttcactctaattagttttaattttcagtttgtaatttgttaattgtgcatgaagacaagtgcttatgaaacagggccatcaaaaaaagcctctagcatataagtaatcacaacatacttccagatcagaggagaaatggtatccttcacacatgaaagaattaatatttgaagatagttgtatctaagtgtgaaaaccattctaagcatattaattgaagttctaccttccccttataaatgggcattcccttaaagtaaaccttctcatgatcagcattaagcaatctgtcagatgctcccagagagagagggaataagcccacttccccaacacaagcaacatcatctggctgtcatattaggcaaagagatcaaataaattagaaaacctaaattacaatttatctaagcccatagatatgaagataagatggttaaatttattggatagttaatagtttggacatctgctagtgaaaatgcaaacaactcaattgggaagagtatgaaatcttaaaagaattgaagagaggagaagaatagacagagccacactgcaaacaacaaaattgcacccagatatggtatgatgtaatgctgtcacaagtggcagcataagtaaataaaaatcatcaccaaagaactcaaactatccagaaaattttcttacataaggaactccattttcgtcaaaaatgacaaaaccagttgtcattgatgctgtgctaaatgctccaaaagcttgaggctgcaacggacttcctgcaatgtagctagatgcaagctcagtgcctccacacaattcaacaattggactgtaataagcttttgaagaaagccatagatcatcatcaacatttgatgtttctccagaggaacaaaatgttctgcatataaccatagttcagttcatttttcttagtagcaacttgattatttacactactgacagatattactttatctttgtccaatccaagccctccatacattgcgtactcttccaagcttttactaagcttggaactgttcccaaaatggtgacacctgcatcctgaacaattgtagttcaataaggttgtgctttggtgcaaagtatcaaactctattgatgcagaatacaatacaacatcaaccatggcaattatgatgtcactaattactaatcagcatttacattaaggtgtgtggtcccaactttttaggtgattaaatatagaaaagatgtaaaaaaataataatataagattttggggaatttacctgaacaaattttccaaaatcacgaccttgaggagacccatggtacaaagccagagttgcaccagttagaaagcaatgatacaatactgttggtccaatcacccatcctaagtttgtaggccagcaatacacatctccaggtttaatatcaatggcagcccatccatcagcagcacttcgtattggtgcaagttgagtccaaggaatagcttttggatcccctgatgaaagtcaaaatataaccagaaaatcagtacaatggtattttctatctgatatattctaagagaggatctttacctgtggttccagaagagaatagtatattagtgatagaatcaactgattgatagcttggagagtaatgatctgacctgccaagagttaaatgttaagatgagagaaagcacaagaaaaaaatgcaacttctctttctttttctgtctccttttttctctcttccatttctgggatctaaagaagtgattattttagtcaccaaaaatgaccatttgtttatattatgatattctttaatgatgacattgcagtatgaattacctggcagaagagagaaaacttttccatgacaagtcttgttctcttaattgtactcctacatcttcacccatcacagggagcacaataactttacatgtagccgcctcaatgactcgactgcaaggagaaacatggtctatgtgcttaaagaacagccataaatctatttaacaaacatacaaacatgagcactaccaaggttgacacatttcatctttacaaggcttggacagcaaagcaatctgagagggcatttaagtcagtataagttggggaatcagtatatattaaagtgaaccaagtaaagggagagctggcttctacctttggtgcatctcactccacagttaattacttttgttaccattaaagaggtctgtttagatataatttagagattataactagcaccaggaacaataatcaacatatcagaaagcatgcatgtaagatattgaactaattcatgtttattattacaagtactcatataagaaatgagacattgcaagtagaataattaaattcaagcaggatttgggagatgtgataggaagaggttagatggaatgctacacaaacatcagcatgaagaagagtaaagtatttatgatatagaattttgagttagcatctgagttgttaatgtgcaaaagacttattatgattgggaatttgggtttaacatgaattttctatttataacagaaaaataaattcattgatgaaaccagtcatttgtgacactatttttctcacatacacaaaaaaataagtgaagagaaaatgagaaaaaggaaacagggttccagaaaaacatgtcctgaaatacaacatagctttgatgatttaacatcacttactttcagattaactcttatattctaacactgggatttttctgatacaaaataaatagaatatcagtaatcccaacacttcatttttccatcatttcgaccatggcattgaatttaaaatcagaaacattaagtaaaaacacagtattgaaacattaatcaaaggacggatcaacagatgaatatgaaataacctaactacaatgaaggttaagttgccaattgttccaaaagttaagtataacaggaaataagcttgacgtgtgcattacacttagcatgcctaccataatctgaacagataaattagacacaggcatcagaacccttggctaatttaaaatacaattttagtatttagaagttaaactgctgaaaatgtagctatgggtgtaatgataacaattgtttacctgtacaaagggaatttcctgccacctcttgctatgaaatcctgaaaacaaaataaagttgagtaaaatacaacaatcttaatttgttactaaaataattggagattcatagaaattaagtctaatattgcacaataccgggaattaaaccagagattacagaaacggaacattaaagtaactaggctagcacttcaagggactagcctcctcccaattcccactcttccctgtttttaacagatttcaaatattcctcaatgctaactattcctcttcccctctgccagttgtctagcagttacaacttacaaaaaattccctcgcttcacttgctcatgtgatcattaatccagtaaggccctacctgtccctttatatttctactcattcgcatcggctgtagtaataggtatttatcagatattgattgtataaatgcttgtatctaatccaatgctataaatttgaagcttctaatatatgcaaaaggagtttttaacaacacaagatgcatgcttctgaagataatatttgtgttcagttccaggcatttaaatttgaaaccttcaagaaatgcctaatatagatgcttaagcttccaagggaacttgaaaggacagtatttattctccaacataataaagatttagtaacgttagcattgcttcaagcatattaaatagtattatttgcacaaatgataagtaagaaagaacagagacattccaaatattgaatggttccatttcaatcaacagtagcttgctttacaattgaaacatcacctgtgtgaaaataccctttgctttggaaacacggagtcgagttgcaatttcttttggtgcaaagctatccgctattgagaccacagcacatcctgctaggacaatggctaaatagattattacggcattggctgtcatttgcatgtcaattgcaattgcatctccccttgagaatgtggcatctattgctttggctaccaacctggaaatcatatggcaacaacaggaagaaaaaaaaatcatcatataaagtaagacacaagtaggaaaagagccgaaacaaagaatatcaaaatgatatacattaacacaaaatcaacagtgcaaaactcaatgcaatgatgcaattgaaaaatatctcttaaatgatttaaataactgacttagcacaagttacaatttaaagaaaaatcaagagatcagactacctataattaacataacttttgtggaaaaacgagagtgtaacttgaatggcttacatcacttggtgccggagttgtttaagcgtgatatgattaacctcggaatcatcgaaaccttcatctctccaaacgatggctaaagtgtcatctgttttgtgggggtgtgaactgggttgcaaacagcaatcggcaatgttgaggacagaaccggggagccaagtcccaccatgtttagaagggtcggaagtatctaaaatgcacttgggaggttcaacaaaggaaactgaaagttccttgagaataagggaccagtaaagctgcacaaacaaatgatacacgttgaaaacacaatactagaataaaaaagggaattagaggtgggagggtagtaggcttacctgagggtgttgaacagaaaacttgtgaaatagaggataactagtaatagggtctttgtaggaagctcctaaaaggtcaggggcatgggtttccatgagacggcccaggttggtgtgtttggattgctctctgaaatcaaaaagcaaaaaatgaaagatgaattagcgtttgtgttgaggtagtggtaagtgataaggcatagtaagagagagatacagagaagggaagcaatagagtgggagggaagcatgttgagagtgataaacagagtagtagagaagctgatgcaaggagtgagggtaagatggtttgagcagtctccgagtgacaatttggcgccatatgtgtgaaggagactgaaactcagagaggatatccctcaaagcatggtataattcattgccttctgacactgttaagcctcctgcattcaccaaatcctccactcccaaatcccgcacgctcttccccatctctctctctctgtgtctccgcagcagtttccaacttgaaagttaaaggcttttgatgggtggttgttgagcttcagttcccaaagttgactacggagtgcgctcgctcacgtcacctaactctttttgatgggtggttgttaggctttaaaatattttttatttaaatttattatcaccaataaaaaagtcattgaaaaaataaaattaaaattaaataaaaatattttaaaaataatatcattaaatatgacaaaaataattaaatttatttatatttaaattcaacgtataacatcattttttacttataagaagtagtattaactttctaagtataaacatgaaagacattacttcctttattagtttatttctatttataagaattagtcaaataatttttttatcctttattacaagattttatttcattcctattatatattaattatttttttattaaaatatcatgaattatttctttctctctcctatagaaattgaaaaaatatattataatcataaactaataaattatgtcttataattaatcacagtgggagtattagattagcatcgaacgccattttaaatagaaacacgagcatactatgaatctcacgaaatacaagtataattagtcttgtttattattaagagaaatttctttagaattaccacgaactgacaatttcagaaggaaaaaaaaaaaaaaaagagtcgccaattattttatttaactatgaaaaattgaagaacttttttttagatgggaaaaattaaagaacttaaagaataatctataaatcagattcgtatttagagatctatatatatagtagagatgatggaaaaaaaaatatttcactgtatcccttatacttttacccaaatatagttatcctaagtgaatttgccaatataataggtgtttgtctcaaattataccatgattttttcaagcaacaaactatccatagtttgctcaagtcaggaggcatatgcatgcaaacttgttccactaaatcaaaatacacatgcattatgcaaaccatatttcgtgttgaaaagaaaagtctatctagaaaaagacaaaaaaataatcaactcaaatatgttaatatataataaataaggtaggagtttaactttctacaccagctaattttctaatacacccagcatgcacaatgtaatatcaattttgcccttttcaaaatccgtaagttacataccgacatacaccatttaattcttacggatcgtcgatccgtatgactcctacggattatcgatccgtagaagtcatatggattgtcaatccatatgagtcatatggattattgatccgtaagagtcctattgattgtcaatccatatgactcatatgaattgccgattcatatgagggtaaagttgaaaataaaaaaaaatatgttaggtgtattagaaaaaacactgatgtaggaagttaaactcataagctagctggttggtatttatttccaaatgctcgaaataataagttaacagattctagatttttaattccaaccctaaaatcaaataataagtttgaaataataatgtcacaattaaataacatagttatcgcaacttttcgaaatcatgtccatataatcgagtccattttactaaaaaaatcttatcaatttcgtacagattatttctgtataaaatattcttgcaactttgcttatgacattagcaaaacatatggtttttcctgtgaaaataaaactataagaaactttgaattttccagcagattttttacagatctatatccacaagaaactcaccaagtttcctatggatttttcacaataactatttgcagaaaaatccaccccacccaaatgtcaattcagtaccattttcaatgcatgtcaaggctctttcgaaaatagttctaaatttcatacttctcaaatacatgatcattcttgctgttcatagatatcatcaaactgtgtcaaatagcatccataactcaataactttggaatccctaaaagtaacaatgtttgacgtgtttcctgaaatttggttaaataaacaaacttaataaaacaaaataaataaaatcaagaactatgaaaataatttacagcatgtcatgattatcattatccacttacaattatgacgaatcaattaaggcactctctggaacagcgagcaaggaggagataagcttgttactacgtacttctattaactatcattctcatttacataaatattggaacattatatataagatgtaagccaaccaaagggcacttgtatcccattcacttggcaaatcggacagtccactctgcagcaatatcatcatgttttgctttgtctcccaaatacaagtgagcaatgccagggacaacagcataattatctgcaacaatgataacatctttacactccaagatcataaatcataaatgcctacttgttatattgattgaaagtgttggcatcactaatattacatggttggaaaggagatttctactaccacaacattttttacaaattaggaaagagataggaagagaagagaagtatgggatagataagatgagtcgcatgatgaagaaagatagaaagaaaaaattagttgttaaaagtattgtaagaagttgatgtaggaataatttcttgttttcaaagatttccataggaaacaatgaaaacaaaacaaattttaaaagtgtcattgtttcctatacaaatcttttaaaaaaagaaaccaagcaataacaaggtaacattttttttaattatttgtaaaaacaagaaataaaacagaaaatgtattcccaaatcaaacaaccccctaagttaattgaatccaaagcgacaaaagacataaaccattagttggtgtcctgttaaaacgtgcttcttctccaaaacaaggcacataacaagatctgcctctactgctgtatttgaaagcaaaaggctgaagaatagaactaacatgcaaaccatcatcaacccctatttatataaacaaaatggaaaaaataagaggtgggaagaacttacaaggatcaggatttgccaaaattgatctaacagctagtagcaccttagtaattgttagcgctggactccaatcatccttcaacattcccacactaacacggccatcagggtctacattgcagtggtaaatgcgtgttttgaatactacctgcaagctcaattatttaatttaagacggtaaaaaacaatgaaagtacttcaaccgctctacattttctggtttgtctgcatatcttggaatacatatcaaaattgttaaatacaataacacaccatctagtagttatatatcttggaaagaaaaagtgacacaaacattcgattatgtattttccaagaattacacttcatatccttatttgcacaagggtgttgcatagttgaatggtccttataatcaatttgcttttcctgaagggacactaccctagtcttgactttaagtaagcccgtgaggaaactcatccaaaaagactagtctattattctgattcttatagtacaggtatgcatttccctaatcgctccttttcaggttacctttgacatcaattatgactcaaaccccaaacgagagtccatcccaaaagactagcctatttgggcggagagcctcatggctcaagtgtcagattgagcccttatactgaatgtgaaacataacaatcagacaaagacaagtccatggccttgcaaaattgaattaataagctgatggagcaagtcatatgtactgtctgcttgaatgacctaggtgcttggtaagacatgacatggtccaaacatgtagtcataaaacaaacaaatatgagcgaaatacacgtgaaattgaaacaacttacacaaaaaaatatgaaatggattagttgaaagaagtgtatgtgagagatgtacctcgggaggcttgaagggataatcaattgggaatttgatgtcaaggaaaaatatgccaccttggtagggtgttcctgcaagcaaagaagaaacctattataaacatgatattcatagtgatagtaatggtaatagtaatagaatagggttacgcagctaccaggggttccaataatggtggcaatccagtgatagaggttatcgcccttggggccagcagagcaatcaggaggagggtcgttgttgagttcgaccatttccctctgaatcctctttcccgatgccgcgaggttgtgggtacccatgacgatgttgatgaactccacgatgattttcctccacttcctgatatcatcatcactctcctattcccacaagccaaggacccaaaggtttcatttcatccactcacttagcttcctattatttttacatcattaaatttcatttaaattcataataaaaaagcattattttttaaatgtttaaaatcctttttaaatatattgttaataattttttttagcaaaatatcatgctagtgttattgtacaattatattttttttggttaaataaatcatgatagttcattataaactaaactacaattttagtccttaaaatcgtaaaatattatcataaaaatccttaaaattaaaaaaatgtcaaacgaattctcgaaattgaaatttgttagtcacatattcatcctaacactagctttgttagagagactacaatgaaagtaaattataaaattaatagattataaagatagttacttgtatatgtccagattaaaatgacaataattttaattttaagtatatattaaacatttttctaatttcatagactattataacaacatctcataatttcaagaagtaaaattataatttactcgattattatatatggctttggaatttggatatcttaaagaaattcttttaataaattcagtgaatggctgatgatactttctttatcatattttaaatattaattaattaaaaatagaagaacatttttttttacattaacataagaataatttagagtggttaaatatttataaaaaaaaataccaattgtcttggtttgtgctttaggaaaatctaaccaaaaggagtttgactgacacccttaatgctatttaacaacattatctcattcatctctctacacctcaaatcaaaccgctttatgaagtggagactcaaaagtgttccatcttatcccaaaaaagacatcctcttgtagcaaatataatagagcctcatcagtcacatccaatctataacactcttttaccatcaaatctcactcgtagttgtatctcatggtcatctaatgcagaaatctcaccagtagcactggtgtatcgcatgtcatgctgagttattagatgggcagcaatactctcacatatgtaaaatcctacttacattgttactaaaacgactgaattcatagaaatggataggcaggagagctagttcgatcagcaagaaaacttgtagttgcacgtaacttttgaacgacatccataaatatagcatattgaaccttgagatcccaatacaaatagaaatttaaaaaagtagccatagaatggtggaaccaaaagttgcttgtggctaataacaattcctcaacctgaatgacatatatataacaagagttcttaaatcagtgaaggcaagaagcgattttcgctgtgtttgtttcatgtcaattgaactgccctggaaactatctaactttactattcctgatatttccaagttcttgtccaaattttgcttccatgcagttgcagatgttagcctccgtcttgaacaaacaagcctaaaaggtattgagttgaactgtaacacctaatcagtgctagccttcttctcaatacttgagttgctaagtattactacaccaattattataagtatggcacctgcaaaccactgtggaacagtttatgcatcagaaaatgcatgaatcaataaggtgaatgcgtaagaggcaaataaccggggccatgagttctttggtggtttagtcatttagcattagcactgtaagcatcagtaacagacagaaaaaccaagtggtcctctactctgttagtgctaaaaagcagaacaacattaaggatcatcagtttggcgccccttgaaaatgaaaacccaaagataaacttgatgtgcaaaattgtatcaaagacacaaaaaaaaaaaaaaaactcatcccggattccttcagctcaatttaaggtgacaccaaaattactatccccacaattaaaaaactccgaagcactttggaagttaacctgattacttcttataatccaaaagcaattccagttgatgggaagagtgtttggtttccaagatcaaacgaaagatataatagttcaaaaatgttgaaattgaagagtctaaaatcattaacaagaatcaataataaaacatatagttttggagatggtttaaaatgatcatgtgggttagatggttaagagagaagaaacgggggaaaaaggcaaggatttgattcctctgctaacaaaaactaacattctaacatttgctaataaaaaaaaaaatgagatgcaaatggagtaacctccagacaagttaaaagtataaaaatgaaccaaagttgagagggtgtattaattggaagcgatagtcataacaacattatgatcagagaaagtatacctggaaagagagtgattcgtgaaagaagaagaaaccggctaaaccggaagagataaaattggtagcgaaattggtgacagttgcctgaagagaggagagagctttaaggctgttgacataacaagcccacatggtgacattgaacaataacaccatcccgtacctgacaaactaataaataaatatatatatatatatatatatatatatatatatatatctaatctaagattcaattaaaggaaagagaaattacagtaatatgaaaattagaaggcgaatctgaatgtaacctaacctaacctggtgaagagggagcttaacggaaatggctgcaagagcggcgttgaatccagcagatactgcccacgcgtacccatttctgttgcctccctccatgctccgattcgatcgcatcacaattcacaatcagacaaattacttgttattttcgcttcagcttttgactgttgcacggtagtggtgttggtttcccaaaggctgtttgttgttgctgcactaatcttgtcagagacgcttactgaaaattactatcaaaataaaatacttatatgaaaaatgctgactagtacagttaagaaatttaaaaaaattatattaaaatgcataaaattatattatttataagatttttattaacatacacaaaattgtattgattataatttttttgacattgattagcaagaccctacttcaattacttatttatgaaaataaattaatatatcaagttttattttccattttacaataatttataaatttaaattaaagaataaaagcctttgacctttctattagtcaattatttttttatccaaattagaagtatttgagacacttattaagtagtagtattttatttcttatttaatatattagtttagtttgtgcaatcaacatcaacattaataatacctttaactcaagttaattatggttagtgatagataaattcaatgataaataaaaaataagacaaagaaagagaaagacacagaggaagaaaaagtgaaaagaaaacaaaagatatgaaaaataaactaacataaaagaggggtgaaaggaggaggaaaaaataaagagacaaagaactaaaaaaaaaacaaggaaaaaacatagaaatattaacgcgtttaactctcctaagtttcggtcgacttctacctctatctttctttgtgttgagctcttggtaacaaactcttgtttttacataatcatccagtggtcgtcttgtgtccaaaccaccttaatctatactccctcatcttttcacacaccgatattactcctacctttcgtcgaatatattcatttcttatcttatccattttcgtataaacacacatccaccttacaatccttatttctgctaaccctattttatgcacatgttgcttatgtgcttgtcagcattccacatcataaaacattgtcggtcttacaattattctatagaattttccttttagcttaaggggaattttgcggttacacaaaaactctgatgcactccttcatttagtccactctgatatgattctattatttaaattttcatcaacttcaccacctttttgcaaaattgatctcaagtatctaaaaacatcttttttgggtacctcttgaccacgtagttgcactgtgtcttgatcatcatctcttacccgcaaaaactcacacttcatgtactccgtcttgctcttgcttattatgaatcatttagactccaaagtgtttctctacaattccagttttctattaacatcatatttgatctcatcaataagcataatatcatctgcaaaaaagcatacattacgacactttttcttaaatatcttttgtcagttcatctatcactaaggtaaagagataaggactaaaagctgaaccttagtaaacacctaccgtgataggaaaataccttgatgttccattacaagcttctacacatgtggtagccccatcatacatatccttgattgcattaacatactttaatgctacatttttcttctcaattgtctaccataagacttttcttgggacgttatcatacgttttctcaagatctatgaatcctatatgtaagtctttattcttcttcctatacttttccattaattgtcgcatcaagaaaataacttccatggtatatctttttggcataaattcaaattgatttaaggaaacattggtctccctccttaggcgttgttcaataactctctcctacaacttcatagtatgactcacgagcttgatgcctttatagttagaataattatgaatatttttcttatttttgtaaataagcacaaacatatttttcttataagcatcagacatcttatttgtttgaagaattttattaaaaatattgatcaaccattttattgtcacatcactcaagtttctccacacttcaatatggacgtaatcgggtcccaaagttttattattattcatcctctttaaagtctccttaacttcatgtgtattaattatgcatacaaatcttctactataaaaaatatcttccaaatccacctcactcttgtcgtcattctcattaaaaaatttactaaagtagtttaaacatcttttacttacatcttcattccttaccaaaagtttttttttattttcattcttgatacatctatcttgaataatatctttactcttcttatccctcttttttcaaatttgtaaataaatttttcactatccttgcttccaagatttttataaaaaaaaatattgattttatatgattaattttgtaaataaataaatcggccataaataggtaattcacgactgttgttcggaaaggagaagcagcaaacagaaaggaaacaaagattgatgaaaatagcctactaaaaaacattgagactcaattacccgcactgaatgccttgtaagctgccatcattgagttagaaaaaaaattcataaaaaataattaccaattttaaattagactttaaagaagacaacatgaatattaatattattttatggtaaagaaaaattattcacccgtatgttcgtacttacaaactcttcgtagttccatccatataaatatatagtataagctactgaatatttcatagatctcatgctaatttttcttaattgttcaactgaacacaccttttcttattaatagttcaaataaattgtatgctactctaattttttatgatcacaacaagtgcataatttgttggttcgagaagctggcagtcatttcttaagggccccgtattaggttagtctcctctgatggctaaagcactacattaaataactatcttaaaagtgtgataaattacaatgaccccaaatgcagaagatgggacatctctgaagaataaattggacccaagaaaagctagatacaaaatcgataggaccacattacacgaatcattgaattgcaatttaaagagcatcgaccttgtggtcataacaccgccagagccaaaaatacaccaatagctgatatcaaatagttaaggctagacacttgcatgttcatactcgcaccaaaggggcctgaaggtccaagtgccattggaggtaaactcaatccaccagtgctcgagttagaactgctgtcaaaatattccatgatcatataagaaatttaaaaggtcacaattactacttctaagtctaataaatcaaggatgtataaagattaagattctataccttccagcaaatatacaggatgaagaacctgcaacaaagtacacagaattaattggttaagtaactaaacgatgtaatgtaactaatatttttttgactaaacatgatcttcaggttcaaatcaaaaacaaactgcaactgctttcttgccctgctaatatgccaaatagggacatgatcaccaaccaaagacactacgaatccattattttatcatccagccatgttttgtgggaggaattagatgtatttattcaaattcaacttttagtgaagccatagatgtgtcattgtgtaatttgaaaagcacattggtatatgcttataacttgaatagtttttataactgtaattgctttctaacaacgaccaatgactttcaaatatatgatttactctccaggggctgttttcctgtttctaacaaggagggattgtgggaaatttcctacaacagttagtacgcaatttgaaataaaaaatggttacatgagtaatagtccaaagaaataacttgaagtgttacaagcgtcccatatcagaatatcaaggttaaaacagaaataagaagtcatatcgacttactaggatccttggtagtaattgtagcggtaccatcaaagtcacaagttccaccactgctatgctttctctgataataatcattataagcataagaggcatggcttttcacattattggggagataacatggctgcccctgttgaattgcagcacaatttgctcctccttgtccacatgcccagctcagtccagattgcagcttatcggtgtctgctccatctttagccacacaaaaaactgctgaagaatttccagcaatcggatcggaagcaccaaacctcaatggataaacagtactaccattggtataaaagatgccccaacttttttctgatacaggcccattcctcttgtcttcattaaacaattcatatatgtatgtattaatggctatgtttggctgactaggagaacctgaatcattcatgacccgctgaatcatattattaatgtagagctcagcgttttcttcagtagcatctggttcattagctccaccaaacgacggccagccagtctctgtgacaacaatgggtatattattgaaatttaaggcttctatagagtagtaggtagcatccaccatagcatcaaacatactgttataacgaaatagagtgtttgggtcaacaatttgcttcatggaaggaagaggttggaaaagagcatattcaatagggaaaataccatctcctttagtgtatccataataagggtaggcatttaacatgtaggaggaatttgtgttcttcagaaactgaaggagttgatagatagtagagttccatgaagagttaaaggtggcagtggaaggaggaaaaggcttagggataatgtccatagactggggagttgaaactttgacccggaagttaaggtttgcagcaaccagggctttgtgaagagaattcatggcaggaaccagaacaggggcgacatttgggatagtggaaagaacctcactgccaactgctattcctgtgatattggtggacgggacataagcaacaacatttttattaatccaggctgcagctgctgacggagattctccaatcctcagtacctcctcattggtgacaccaacaattacttcaatgctagtgtttgaaagagcttgtagtaagtgtgcgttagcatcatacagacgcacatgagtaatttgattagcttgtagaatgtcaactatatttgaagcagatggcagatcagaagcatcagtgccaatgtttacccccacaaaggcacctacaagttaaacaatttgatctagcatcaagccatcaactcaaaaagataatagacagtcaatgtcatactcatacatccacatccctaattgcttccccttgtggtaatcataacaggtatagaaaaataaacaggctgcccaacgtacaagacatatggtcattataattatgtaagaaaagcaatagttttgactgtaaaatacttgcttgcaactatcaaacccaatccaataatacatgaaacacctcatcaattgtacttaataaataataaatgcacatgcaagcacaagagactcggtccactcggcagtcagcttgcagcactagtgactttacagtcagaatctgatagacaatgaaaagtaccaaagcataaggagtccaggaggaggcaacataaactacataaatccaatctgacaaagccaatgccatttccaggataagtttcactctatttaggccaattttttttatgaatgcatgactattggcaaggctgtcacctatcagcaatttcattttaatacacttttgatccaaatttaattgacacacggtgtaactgcaaaagcagtctagactatacagtatgtagactgatcgtgagaacaaagaaatttgaaaactcaatttcagatattcaccacaaatatggaaaaaaaagaaggtataaattacctaatgtagtggtaagcacagcaatagtgagcaacaaaactctcgcaagccatgttttaagcttcatcacatccaatatcacctgagtgaatcagcaatttcagcccaatgttgctgtccagcaaagccttagctgaaaacttgagcaataaacacgaaatcacattttgagcaataaatgaccaacataacacagacagataattaaacgaagtccactagttggatgaaacattaatgaacaatatctactcttacataaaattgatgttcacagaaatcaaatctagtaagaacagtgccatattcaacaagctttccaaataggtagtacatggtacacctcaaggcccagttaaaacaaaaataaataaataaatactaaaagatttgccgtttatagacatttttcttaaaatggagaagagagagaagcgtgatttcctcttttagtacaaaaaaaagcataataacctaaccctcatagaggggtttagaaagaaaggaatagaagcgcggactgtgcacctgatctttcttaaaaaccccgaaagagcttgtgttgagtagctactcttctgttgtgggtataatgaacactgaacactagctgagagaggtggaacgcgcagaaaagaaagtgcattcaccacaccaacacgtagcaaaagctaaaaccctgaaagcggaaaccgttgaattgagagatttttaggttgcaatgtgaaggtgttgggaaaaggaaggaatgtgaaagagttggcgaagaaagggagaggcaacaacagtgtgcaaagtctcactcactttactgtcccaaacactgcccagtaaagttattacaaccggacaacatcacatctgcatcattcccgtgcgtgaataaatgcaactttcaatttctttattcataattcctaaataatgcattccccataaagttttttcactgcttttataatttaaaagtaaattttttttggttaataatataaaaattgatactgcttgtctattaaaaactccttatatttttgggtgcaacctagagatacatgatacttttatttgaactccagctattttttttttcataaaaaaaatggtattcatccaaaaaatactctaactattttcttgtcctacgtcaattcattttgaaataaggtgatattttctgtgatgattctaagaaattatttgattgtgaggaggaaagaaaggagaataggtgagaaaaaataaataaaagaaatatgattaaattagatgagggtagaatgaattttttgaattaaggttagttgataagaaataaaataagggaaaataaatatatctactgagtaaatgaccattttaatcttattattccttttattaaaacaggatatttacaacgcggagcactaagccccctcgccactgcactacaaatcacctgcaaaattagatatgcaaccaatataactagatgaatcttattataaatatttatcaaaacgccacaacatgtccccacacttgcaaaacacaaaaacacttttcctattccaccaggtaagtagagcataatatagtaaaatatcgaaaatttcttctccaatctacaagctgatagatgtgccaaagttgttgagatcgaggaagttgcgaaaatcttttcctctatatgtttgatgatatattccaattagtggtggttttaacctcacataaattatattttaaaatttaaattataaaattaaattttgacaactaaaaatgactacaaaattattaattatttaatattattatagagaagggctaaaaatgtatttttcaatttaaagaactaaaaaaaaacaacttttaatttaaagggttaaaataggtatattttcatatttaagagattaaaaatatatttaagtcaataaatttatatcaaaattgtttgaaggatgacaaatatttcattaggtcataattatttaaagaactaaaaaaatattttctacacacaaaaaattactcaaatttcaaaatatgaaaaatataaaagaaagtcacaaaatgaaaagaaaatattttagaaaaaaattactttactgagtttactctaaaaaaaggaataagtgaaagtattgaatgatctgggccaattaaaacttatcactgtttacttggttggacttctttactcctaagcccggtttggcccaacccatttacctttacctccatccaaacaaaccctatccaaaaaaccctagaatagacgcactccgttatggtgagataaaaaccctagacgccgcagcgcctatatatactactactctattcccaccctcatctcaagacacttaagagaaaatggcggtacctctactctcgaagaagatcgtgaagaagagggtcaagaagttcaagaggcctcagagtgacaggaaaatttccgtcaaggtagtatacattttagcctcttcattctgattaatttaagatgtatcgtttggatgagtaattttgtgattttacactttgttttgtgttgcatatagctgttgagcttttttatttttattttcggtttagttaattgtttgatatgcgtttcgtcgtagtagcttgctgctttttaaggatatgatgatattactttgtcgccccagtcttaatttgcaccacaaggtgtaagatggtgattgacattttatctgattctgctgtattatttcaacctgttatttttttgtcaattttatttgaatttgcttctttaagtctcaattgttttggaccgatgggataggaggataaatttgacacccagtcttactatattttttatatgtgatgagagatcgactatctgatcccatatatgatttgtgttgtacttttgttggtgctttgtttggtttttattgatgttgatttgtttcctgtttgccacagttttcctttgttttttgttttaatttgagcatgggatttgatggtaactttttggacacccagtcttacttgctccattggtgcactctggtgaaaattaattgtctgatcctttaattaatatgcattgattggcttgcctagtaatttcttttcaatctgaataaatttccacttaaatttgttatttgtatattatgaaatgcgattgtaaagagatatgatgatctttatccatcaattctgcaatagaatgatgattactaacatgcactaccatctgatctctgccatccttttcatacggttgagtaattttgtttgattatttagtgattataacttattatctttaagttgcttaaattaagaatttatttgttaatttatttgcccatggtatctgatgtccagactttggactcttgtctagctgtagcttgacatctcgttttaagggcatatatagaatttttacaggccttgcgacacagttggctttctttactactataagctttctgttactattttcctgtttacatctcttgaatacctttatgttgatctcaaaaatcgttttcattttattaatacttttcttgcacatgtagttaagaatactttttgttttaccagaaaatagtctgatctgcaatctgtgatgacatttcaataatgtgctgattgtctgtgattattatcctaatatcaccatctttcggctgagattgcagatcaaattgttcttgtctatgaaattattatactagggtctataactaataaccttctatttttttattcaacagacaaactggcgtaggccaaagggtatagattcccgtgttaggagaaagttcaagggatgcactctgatgccaaacattggttatggttcagacaagaagacccgccactatcttcctaatggttttaagaaatttgttgttcacaatgtgaaggacttggaactgctcatgatgcacaacaggtgaacgttgtgtcccaattagtatttcaattctgatcattttgcatctaatgtttcctgaccactttatttgtctttattttaggacttactgtgctgagattgcccacaatatatccacaagaaagagaaaagatatagttgagagagccgcgcaacttgatgttgttgtgacaaacaaaacggccagattacgcagccaggaggatgaatagtctgaatgactgaaagtcacttatttgtagtgatcctagtgacactcttgacattgggttttgatctttttttcattcttctataaattgtagcatgatatacaattaacatggtttctctttccctcacttgccgtctcaaattcaatttgttcttgatttgggtttttggtgcttattgacctttcagataatagtacgttatcagctaaataatttatataaactggaacgagtattatcaactttaccccatttgataaaaacgatacatgtatttaagccaaacaatgttaaaggataaagcaaagtatggtgagtgaataaaatacgttcattgataaagcaaaattcgagtatttaagccatagtacgttaaagcttttgtccgttatattagctcaatttcaaatttgcagtttgcttattgagaaccaacttgattatgatgtttctctttcatgccgtcgtatcttgccttgacccttgccatgccaacatctttaggatcgaaaataaaagaaaccttatctttcgttgtttcttttgttataataattctatcgcatcttaacgcaatagttgtttggggcacacgaatgcaatggtttgaaaaatactagaaagcactgtgtagtgaggaggttaacaccaactatgtgtgtcgtactggacatcatgcataaaatctgtttggattgttgtttttaaggtatgtgaagttaatcagaaaatcagagtacaactaatcactatcataaaatcagaaaagtgaagttatcaaacgagcagaatttaaacacgaatgatgaggaaggaatctcgaccaatttcattttctaaaacacggctatgtctctaatttgaaaatttttgtttctgcagaaacatgaactagaggtggcaccaaattagaggtgccacacattaaaaggaatacatttagattaatttgtaatctcaataaaacatacctttgtggtgatgttgacaagtcatgtgcaaggaaaaaaagattcatccaaccaacggtttcatatagattgcctaaaaaagatcctcaaggtataagaatgaactcaaagtagtgtcatcagtggaccgtggcatggagtgaagtctgcgactaaaatgggtattcctaggagtcaaaaaggataagttattccaaatacataaatacagaagtgaaggaaatatagatagatgaagttagaacttagaattggggtacacaaattagggttatgcagaacttttacgtaggattgaggtcaaaaagttatgttggaagttcatcagggcaacaatgtatttaaagacggaataatgtgactatgtgagcattcattgaatatattttagtatttcactatactatataacttggaaaatttataaagcagagccattacccaaatctgaaggtcatagacaaatagagtcttaaaggcttcagcaaaaactcttcttaattttcaatttggtattcaaatgagaaaagagaatgaaagaatacgagaatggatttttagcagcttgagtcaacagaaaggaaagagggtagaaagggattctatagtatgtatacaaaatcatgataatcaacataaatcatcaatataataaaagaacaagcaagtacaataccaagctcatatctaacccaatggtatgaatctgaaactgaatccaaaagcaaggcccgagtgtaccatgtattctgaaaaagcatccaaatcagtagtgccaacctgatcagcatgtattaactccatccttgcaatctttagtcaaattatagaacgtttccacgcatgtctttccacggtaaaagacctctgtatccactgcaactttcatgtacccatcaaactcaacaggctttccattgttgataagtgtggtctcgttataccactcacttgtatttccccacagctccttatagtcatcaagcaaatgcaccttgtaatttgacctcaacttatcaaagtaattataataaggctcattggtggcaatgtacaaatgcctccaaggctgaaccatccctttaagcttctcaacaagaacatccggcgacgtatcataatccaaatgaggccacaactccttgttctgggctttctctccccgaaccacatgaacggcgtcaaaatcccagtccaaccttccactaatctcagtaacaatattcatcaacctcttggatttccacacagcatgccaaggcctctgaatattcttagcagcctcaccttcacaaaccctataccaataattttcaggctcaggcgcatcaaactgcctccatataatcgtactcttatccttcttaagctgcataggagtcaccttgtgattgacaaccttcctaacaggaatcttcttcttcaaatgcgttttatcccacttcttccaatccctcaaaaactcaccttcctccacaatcgaagccgtctccttcaaatgctcgaaatcgaagtagtacctaaaatccttcccctcctcatccttgttactagggttataagttgaagccaaacaaacactcaaatccataacaaaagtcctgtttaaaaacatagcttcccccaatccacacaagaaactccacaaataatgattcattcccttgcagtaatccccacctctcgagtaatacaaatacttcccattcctaaaattagtctccgatcccaaagtcggaatcgtgtcattgatctcatcatcgcgggctgaagcccgcggcggcagggtccgaccacccctggcggcgccggagcgcgtcatattccggcgagcattggcgccagagtgccagccgccggcgtgcaccaccttgtacctgcagtcgtcggtgacagcgatcttgaagcggcgaaagtcgcggtacttgcgccaggagcgctcgcgcttgttccggaagcgccacgcgacgtcgcactcgccggcgacggagccgttcaccggaggctggtagtcgaagaaggcaatggacttgaacgcgcggaggttgaatctctgaatagcaatacgaacgcgagggttggagcagtttagggttccgtcgcaggcggggggagaaggaagcgccgcgtcggtggagtcggcggtggaattaacggtggacttggcaatttgctgttcggttttctcgatgacggcttcggtgacggccgcggatgagggtggcggaggtgggaggggagggtcttgcggcgagggagcgaggtcttcgccggttttgaggacggaggagtcgattcggaaagtggcgttttgtgattgggtgaagaggttagttagggctggggtggactcgagccatgggtctgggggctggtaggttatggctatgacggtgaagattaagacagagaagacgaagacggagaagaagaggttgctaatgagtttgatgatgttttgggctatgggttcggttctgctactgttgctggagtttgagtccttcattttttgagatctgaaggtgaggaagagaaagaggtggcggtgttagtttatgggctacaggttaggggtgatggcgacggaggatctgaatctgatgccgagtcattcagtgctgtgtaatgttagagtgttacttacttcacttcacttgtcataaaaaccaagattaaatgttacttttgtttactatgttcattggttttttatttttatttttttttaaaaaaattgttacaataaattttaaaagttttattttaatgttttagattaaaataatgacagtcatgaaaccaaaaatggaagcaaaactcaaaattttcattgcaacatgagatcctaaatttcttatcaccttcaaaatctaatgtttataatgtatgttattactatattatattgtttatcttctggttgttatgaaatttgtagaaaaaatgacaaaagttaaaaaaatagataattaatacatatcattttgtaatcgtcattattttaattacttatttttaaaaattaatgacacattaattttagtagcagaaataaaaaaaaattatcaaaataaaatttttaaaatttaatacaccaacataaaacaagtataataaaccaaatggcacaaagccataaaagaaaacataaaacttcacttcactttttttttcctatttgttgttgccttttcttcgttcacacattagttattcaggttagttactcgttatgtccgaaaataactgttatcctagttattttaacaaaaaaaactaataaataaatgaaacaaaataatattaattttacaaaactaatattattaagtagataaaagagaataatattagtattagattcaaaaactaatgtgatatttattagagttattggtgaaaaatgataataaatattaaattaaaaaatcaaataaaacacttattttaggattctttttctttctaaatgtaacttattttaggaccaagagaatatattttaccaatttactaacttttatggagctttatcaattactactataattattttgattcctggtccttagagaaattattttaaaaaattcatattacataagttaaatatttattttatataattaaatttacaataaatcaatattttaatttaaattattttataaataaatttaataataaataattttttaaaaatatataaactatattttaatttagaataaatatactatttattatataattttaaccgatagatgtgttataataaatgtgttagaaaatatatattagtgagacttctcattttaagtagtgtttttatttgactaatacaataaaaaattgattaaaacatattgataatgtaaaagttttttcactactatttaattatatattattcgtataataaatttgtggattttttttaattattttaaaagtcatatttaagatggtttctaattgattaattgtgtaagttttaccctaataatatgaaattaatcttaaactaggttttaaaatacgtaaatcaatgtattttgtgtgttttatatttatattttttataaatatgaattttcaattatgaagcttcttaagagaactttgaatcatgaagttaattttgaaaatttcttattgacaaatactaatattggactggtttgttcagacttaaaaaaatagttttaagataagcatataggatctgtttatcaaaataagcaaaaattaaatttttttaagcaaaaataatttatacaaacaatttaaaaaaacaaaaaaaagtacttattttattaaaataaatatttttccaagaaataagtttaaacaaactcaccgtccaactaatttacaggtgtctctgtgttttgttaagaactacaagtactaacttataatagccatatcattatctatctgtttgtgtgttagtgtctatacatatataaaagggaaaagatcacaaactttacgttcataactagatgcaatatttctacaattctactcattttatgtcggacaatgtaaattagatttacatgagattgatatcaacctatttgtcctctgtatgaagaggttgtgaatacttgtcatagatgaattaacttttaaaatttaaaaagtcaaataaagtgccagtgactttattctagtggaccttcactatagtctatacacatatttagacatgaagaactatggaaaacacatttcagcggaaggcatgctcgtagtcatgataacggaagtttttgtatatgaagtgagctaaccaccgtgacagtgcaaatgatagtactgctaaggcaaccattgaatttctttttgccactgacattgtaccatgcttcatgacggcaacaatcccaattgaagcaacagatatgatctgcagcattacttcaaccgcattcaggctcttataagcagaattgcaactcttgcaattcaccacatgggaccagtacctgctcaaattaatttgtaatcaacaatcccaaaacaaaatttttcaaaaatttattagtacatatgcaagcatgttagtgaaacctcgttagatatagagatgcaacattgaaacccaaattacgacataaattcgtttttgtgattacttgcctttgttcaattatttaggaaaaaaaaatatatactcaaagtcagaggtatcaagctgcttttgtgaaacacacattaaagcatggaatttctctctgctgattacgttgtagttacaggagtacagaacaactttttctttctccattggctaagaattttagattgataaaattcttgattatggtggacttcattaaagatttatgcttgatttaatatagaatttggtcccttaaagcaacaaaacaacttgtgttgctttagtccttgaaagtgcctatctacacaaattgatcattgaatgtgtcaacttgttaacaattttacccttttaagcttgtaaataattctatccctccaaagactaatctgtatagatttttcagggacctaagcaacacaagttgccacttccgaggaccaaaacgaatactaactctttgtaactcttccctgaattaaaggaaatggccaatctatttataactatattgaaacttccatgttcaagagcaatcttaaatgagtacctgtctaaaagctgttctctcggaggtgttggaggaagagctccactatattttcctctccaatcaacctgaccatctgcatacttccttagccatgttctataaccaataacaagggcgtctgactttgttggcacaaaacaggctttgtgccaattgtttggtccaatatcctttagtttatgttcctatcagaagaatttaacaaacaaatatgaggaatcaaattaaattgttttccagggacatattacttttctatggagacattaaaactgaagaaaataaaacagaccagacaacaagaaagaaaggtaccaaattttagttacatgtagaacataataccagtggcaactggatgctgaaacataaattattaagattttgcatcaatgttaagtgatattattcacctttctaagagatattctgtcataaaatctgaagcacatgtggaattatatagcagcagattataataagaattattttttagccattattgggacaaaatcccccaacaattagactaacagaaaattaatttaggttggaaatatgaacgtgcagttgacagtttacatttaacctgaaaactctatccgttcacccaaggctaagaaaaattcgtttgagctaatcaagttagaagaatataaattttcagcaagcctaatctgtaatactgactgaaactcgggtaaccaatctatcataatttaagagattaatataaaaaatcaattaaaaaatttaacctgtacacaaatgcaaggaaaagttaacctggcaactactatgaataaaattttcattgcaaatggccttataagttaatcaggacaaagacaagctgaataatctaatccattgaaaaaaattccacagttatcaaattttatattgttatgatgtaacagtagcaatataaaacctgttaaggtggtttgggcatgtacaaagaaggcctccaaaggtgctagttagaagagtaaattgtatgatttttagattagggaaaaggagaagagggaaaccaaaaaggacgttggaggaaatcaccaaaggagatctaaggcttaataatagttctgaaactttgattttaattttgtcgaatgacgttatgtgattcatgtaactgacctcacctagtgggataagactttgtttttgttgtacacttgtagtagtaacaactaatatcattcatttattgttttttattagaaaaagagagatataaatcataagattaaagtaggaaaaatgaaatggaagagtaccctgagttatctgtgataaaaaagtaccactcaaacaaaattttactacacaactataaaacttgtgatgttatatggaacaaaatgttgggtggtaaaaaacaaacgagagaataaactcaatgtagcagaattgagagttagactctttgcatatgcaagggtaaaactgagtacaatatctctctcccttcccttagcatagcgaggaacctctcgacaatgaggtacgtagtttttttagcagaaatgagaatgttgagttggatgagatgacatactagacaagataggattataatagtattgggggaaaacttggggtagcacctattgtagaaaagatcatacaatcttgtcttaggtagtttggtcatgtatgagaagacctatagaagcccaataaggagagtatatcagatgggtagttagaggtagaggaagcccaataaaaatagtttgtctgtttgtgtataaatatcatttacaacaaaacactatcatcgtttaattcatgcagctaataccacctagtgggaaaaaatgttgctcctctttatgatagctttattcagcagaacttacaatagtttgaagaggaaaaagtagagtgatggaaccaattagttgataggataaataataacaggcgttacctcaacatggaggagatataaatctgaatccagaatcaggttttgtcccacatgaaatatccatcgtggtacaattttgtccatccacaatccaaagtttcttgggaagcaccatatcaatctgcttttaccaggactaaccggaacacaaacgaagattaaacacattttcttcttagctgatgatttctgcattaagtgtaacacaaattatacccttagaaatactgcctgcatattgtttctgatctaaaaatagcatctactcaatattttacgttagtttcaccagatgaggcaggttgatctggaggatacacataaaaaatgcatggtggcataaatttgcttttggcccaagcctgatctgctgaaaaaccattgatatctaacttttcaatagacatgtcaagtggcctgcccccttctctatcagctttcactgttattaagctctacatatgtaagtgtcatatataagtaaatagaaatttaattaagttaaaaaagatataccttatatgcctaccttttggttgctgagtacgcattagtccatagtgtgcatatggaacatgtgcagggtccataagattttccatcagtacttcatacctaaaattgcatattcattttgttagaaagatcaaagatacactaagtggggaatgtggttttcgcccccaggatgcaaattctatgcataacgtcatgcttgtgttttcatcttccagaatcagctaaataattagaccaattaccaatcacaaaaaaataaagaaaaaaataatagttcagtagcttcaggtaaaagaaagtgagccacgtacagatgtgtagttctacaacacaggaaagatcttaatagtctaaaatcatacccataaggaatgtctctgtttcccattaatttagtatacgatggatcatccatttctggtatgaatgggggtctttttcttgtaataatatctttgtattgaggatcagtatttggccagaaccacaagatatcattctgcacagtacttgggtaagcagctacacatgcttttttggacgtatgtacctacacattttttttagcaaactttaatgagcatcagattgtcccattgtatgaagaaacttggaagcatttaaaatttttgaaaataaaattggttaaaggaaactccaactttgggtcatatgtgacttacctcctgagtttcataagggtcacaaaacctgctcattatttactaaatgggcaaaagaccccattcaacaaagtaccaacatacattcatctggctaatggataaagtataaaaaaactcaaattttgagttgggtgtgatttacctgagtttctaaaagggttaaaaaaattcaggtgtaggagtcatgtactgacttacccaattggacctcacaaagcacaaaactaaaccatgtactataactgactatgtaccaagttggatttgcttttttgaaacatgagaagttttgtattgtgtcagttgcttaacttttgtattctgtaagttgtctatatactattaactgagtatgaatgttgtacgttgactttcctaagtacaagtcaacttctggtcatggtaagtggataagtcgacttatgtaagactagattgtcacacatcaagtaaagaatagatggaaactcttaaacttgggaggtgtaactcataccttttccattaagaaagccatgaaaaacaaattacaagtctacaacataacttcacatcaacaaaaagaggaggaagaggtggccatgagtgacatgcataggggtcaagagtagtttgaagcattggtgagatctagaaccaatgaacttagagagaaagtacgccaccagccactcacaagccactaatgttccacgcatcaacataatatgatctcaccttcaatattgcacgtttcagaacatgaaatcatgatgacaagctaaaattcatggccaggaaatgagtaaatggtacatgcaaatcataatcttttgattgaaaaaaaggctgaaaagtctgcattttcatatgcgttctggctacttactacacaggaaatgaaacatacaaaaaaaatagtgaatttgggagccatattacaacaacatgcattaactacaaattatgaccaagagtaattaccggagggccatcagggagtgcctgaggaatgagctggcattctcctttgccattgaaacaccaaccatggtacacacactgcaacctgccccattgatcaatccttccatcagacaagggtgctaatctatgaggacaagcatcatcgtgaacctgccaagcaccctcattcctatcccaccacacaaccacatcaattcccagcaccctcttcccatgtggcttcctcttgtcaaggtcacaaattggcatcaaagggtaccactgagagtaccagtcaaatttctctgcatgactttcaaattctggctcaacctcaggttggttactggattctgtcaatggagtgggtgacaaggcagttaaaagcttggattttgaactgcccctgagaaaaaccaatgaaactggtgaagccactaggttgctcaagaatatagatttcctaaatgactttgatgtttcatgtgctgttgggatgtgaagtgccccaacagaaaaagcacacacagcttccatgttcctttctgctaaccaaaaggaacaagagtacaacaagagaggagagtggcaacacacaatgaacaccccaaagttatatgcttcaactcaaaactagaggctcacgttttacgttcatttttatctgatgctcaaatttaaggggaagtccatgtgattccagttgtcaccatcaaccaagtgattttggctttgtaataaggaccttatcgctttgtggcatttcatgaaatgatcacaaagccacgtgggtgattaggagcttggagctatgaatggacaagaacaaacgaaggactgtaatcaaatcacctctatggtaaaaactaaaaacttacaaaataaactgcagaattctgatacgattttttccaaattgactactacttgccgtttaggcccgtggaaaaagtttaaccaaccaaaatgcttgttgttctttcgaattttattttattttctttcatattaattttttattttaaaaatatagacaaaagaaacccggctgggatactagttccagttcctttacagcccattccaaattgctccaccctcttattttgggcctttgatcctcctcaatcaattgaaagtaaagaaaaaagaaagagaaaaaaaagaacattaaaataaaacaagagattctgcagcttccatgatcctctgatgatcccgtgtgagtgttgatgagaaaacaaaggatagagggatatctgtttcagtttgaaacttcaacatctcttcttcacagtcttagttctttctagtttatctcttctgttgttgttagaacgacccaacacaacattacacatttcacacagatctggtccctttttggtcactgtcaacagaaccatcccttctttcaccaccgccaggtaccaatttcttctcgttttcctcaattacttcattcacaatttacacctgatagtgatgccccaactcgttactcctcttcccattatttttgtggttgtatgcatctgcgctctcctcaccgacactatactattcttaatattcatttgggtctcgccctattctttttctccctttctgtccctctttttttcgctcaaagttttggtttttaaatttgtcctggttgaatattttcaaggaacttatggggtaattagttgctgttggatcagtttttttttttttttttcctcttttcgttctctttatcagttttgcttttgataactgtgtgtgcatcttttctgatttttagtctcatgggttatgccaaaatgtcatctttttttttttttgttatgcaatggcagtgatgataacatgaagaaagaatcagatatggagggtgatcttcaaaggtctctatctttgcgcctaaatcgtagaggagatcgaagtagtcaaaattctgctaaaggttaggaaggactgttatacactgttttggttcttttatctgctgagaaatatctcttttgtttctttactagattatataacagtgaaggaaatagttactttggccttggcaaataaaatctgtttgttggtgatgcagattttgaggtgggtttcttttcttcagggagggtacctcaagattaccccatgaagatcgtttggaagaaagggtttgttcggttggttcttgtagcagggatcttgtggatgttattaattcttcttgcattgttgttccatatatggtcttgtcaaacttccgtctcctttttatcaggttagtaaagtttttaataaatttcgttacttttttgaaatcttcttaagtttatctcttgttgataactactacttaattgtaataagtaataacatagacacttcatctaactgtatattctcaatgtgatattttgagaattgggttgaagggaataaatctcgttgctttatattttaacttgatcttcgtagctgcctgtgcccgttgattttagttgttcctggtactagaaaaccaacatgtacaggaagtttcttgcaattcatagatgatggcttttaaaaagaacagtttggaaattcatttttcactatagataaggttaagtcttatgtctctttctctttcatactcataagttcaactcgtagcttaattctttagaagtatttactgtggaattagaaggttagcaactctttattttctagttgaaataagaatagtataatatttctaggcatagagggaaagctctgacgcttggtgaccagttggtcataggtttgaattctgaaacaaactctttgcatatgcaaggataaggctgtatacaatagtcctctcccatactttcgtatagaagccttctggtgcgggggtacgttagttagtataatatatcttagtacagaaaattgaatttaatgtgatgttttcttgttaattattgtttttctttgatggtatttgtaaggggaactaggacttcacttgtcttaattttatctatattaagttagttgaaactaactttgtaaatacaaatatctacaatctgattagtgaatatagatgcaaagttgctatgattagaatttacaaatgtaggatgataacttgatgggaggttctgttaggtagacatacttcaagaaatgcttgttcattataaacattttgtcttttattttattttttccaccaaaattgtcaacatttctgaaaatatagcaattttctgcttgacctgcagctatgtgtaacaaagatagcaaggtttacaacatgttaggcaatatgggacttgtatcaaaacctcacagtaagattttggtggttttgcttccatcccttctttttgaacttcaccaaatgataactgtgtgtttgatattggtgctgcctatgttcgttaggatgtccaattcctctttccaatgaccctgataaaatagttatcccaactggaacaactcccaacaaaattctcaaaaatctgtcatatgttatggaagatgaggttccacatagtgaagctcagtcatctcctctatttggaggccatccaagttggaaacaaagggaggaaagtttcaaactaaaatcaaatatgaaggtagattagttagcatgatttgctcaagttcattttaatctcaattgcttcacaattttgcaagattgcgtcgtagttgccataatcaacaagtcatgttttcccatgtgctctgcccattaggtgcattgtggattcattcgaggtggtggtgctgaaatgaatcatgtagacatcaaatatgtcaagaaatgcaaatttgttgttgcatctggcatttttgatggctatgatttacctcatcaaccatcaaatataagccttcgctcaaaggagcttttttgctttcttatggtggtggatgaggtatctctgaaattcatgagggaaaatggtactgtcaaagaagacggagctggtggaaaatgggtgggaatatggcgacttattcttcttaagcatcctccttatgatgaaccaagaaggaatgggaaggttcccaaaattttaacccacaggttgttccctcaagcacagtatagtatttggattgatggtaaaatggagctgatagtagatccactgctaatccttgataggtacttatatctgtttaaatgttttatccctaattttatgataacatcaacactttaaatctttgtttttttggatagatatttaaactgccatccttttcttactcaagagagcttagaaggataggagggaaaggcatttgataattttgaatttgatacatttcatgtactgatcagtcacttacactaaaaacattatggggcactctgtttgaaggactcaatttaatggatttttttgctttcccatttttctcttacatagtctttatatatttacaatcatgaagttgatgcattatagaagcaaagtattggtttggtagggacttgcttgtcacgtgtttctggattttcttttgggataacagttgattgtatcatgttaggtttctatgttgccccttgtgatgtagttttgacactaacctcccctcgtctcttctcaaacaaatgaaaatggtacttgaaactgataaggctaaaactttctagcagaatggatagcttttttcttgattcctggagttacttcccttgcgtttatttgcacatgacactttcataccctgtgttgtgtaacggcatatttaattccttttgaaagcactaattcatacaattatacataccacgagggatattaatgtaaaaatataaaacgggataactttgaatgaatattctatttcaaccagcaggagaaaccacactgaaactattgttataaactcacccattgaagtttcatgttaagagcatacttactacatctgtattgttgaaaaaactgctgatcatgtctgtgcaagcctttctgtgacttgtgatgactgtaaccttgtaaaactaccttaattatgcagatacctatggcgaggcaagcatacgtttgccattgctcaacacaagcatcaccgtagtatatatgaggaggctgattcaaacaagaggcgaaagtgatatgctcgaccccttattgatctccacattaaaatctattattatgagggaatgaagccatggaattcaaataaaaagaccaatagtggtaagacaggaaacaagacctctggttttatattttatttctacggtttgatttcaacaattttggtaagaggaaacatattgttttgtcacatttctgttaattttctaattttgttcatatttgttccatatacaacaataacaacaatagccgtatttcaatagatgatgttgactacatgtatcacatgatgttactgggctctttaaaaacagatttctgagggatattatgagctgtataattatgtaaccgttaaccattgtattttttactctaattataaatgaaactatctgctgtatagttaagacacatggattcattcaaatgttctcttgttcctctctaatgataatgtttggtgatgcgtattgttaacaataatatatgatgtttcagatgtaccagagggagctgtcatcattcgggaacatactgccataaataacttatttagctgcttgtggttcaatgaggttcacctcttcactcccagagatcaactgagttttggctatgttgcatacagattgggggacgcgttcaaattctttatgtttcccaactgtgaatacaattcactgtttgtgttgcatcctcacacaagagagcactcttctcccatagaatgggttaaacagttggatgaacttaagaaaggcaatttaaaagaaagtaggggaggactaggcttgtttaccccttatcctggggatcttgattctgttgttctgccaaatgtaacaagaacatcaaaagcaggctgacattttgattattgttttaacatattcattttgttatgtattttttttcaagaacttcttgatgcttattttgtttaatcttaatgaaagtaaagataaggcgcctttatatcgttccacgagcctttgagacataacttctgagttgtttggtaatagtattagtatggtagaatagatccatttgcatcttttccatctaatactcttcattaatcttcatttcttagtgttgttaaagtagtatagcttaaatgattttaggatatttgctagtccactgacatttgatattgctcctgattgtatcaatgtcttgattattaatgaatgatataagtattttgcagtgtaaaaaaaaggttcaatattcttgtcatagtctaatattttttgttttaatcttcagtaaaaaaaaaaatgcaaatgagaggaaatcaactgatctcgcctctctggtctctaaagataactagagtgtcccatacgaaatatttaagagaaacaaatttattttcctttttcttttccacgacactttacatgctccatttcatgcttttttcccctcagcacaggagctagttcgatggtcccttgttgccttttattgttgtgttggtgcttattatactattggtcggtggtctcctacctcttagatttgttcttgttgtattgtgctttgtgttgtttagttgaagaataaagcatcttatcacatttttagaataagggaaaatgtgttgtctgttcaagtattctcgacgagattaggaaaatgtttaccaaattattgttggaaaataaaaaaataaaaagaacctagggcgtttagaagacacaggaaatgaagatgctaatacaaaggggaaaatagactcgtcattaaatgaagatgctaaaagataatgaatgatatctttcaagaaataagcaaatgcatacatggtggaactgcacattaccatttaatttgctcggatcttaagttctatctttgttgtcattaattaatgttaaaaagaaaattaatctggtaaaaaaatgttaaaagatattaaagaatagatagatattccaaaccacctacttattataaggtaagattttctttatgaataaaacaaatgataacaaataaaaaaagtttaaaaaaatacaggtgagcgagatatgagattgcagtttgacatgtgatggtaggacaaaaaagaaagagatatcacttgctaattttcttattgacaattcaggtaaaaatattttcttaaaatctattgaaattaatgcaattaaaggtatcaagccaatgtttgaattattagatacatggtacaagaaattggatatgacaacgtaatgcaagatatgaaaattgaaaaatgatgcttctaatcttgtggtaataaaaagaaaaaatgttagaaaaatagtctatccctaaaatttagatgaaaaacaaacaaaaataattagaaaaatattttgtggttgctttgagcatgcaaggaatcattaaattcaaataaaacgattgcatttaaccaaatcctccaataaaacgaagttaaatgatagtttgaagtatccccataatggatagcagaagtaaacatttgtaattatatgaaacagaagtatctattgccattcatcattggtggttgtttgtcgaccatctttgatcacgccagcgtaattgacgaccaggaaaccttccacttccagatgaagaaatgttgctctggggattagtctgagtaccttgtgaggcccgaggcatccttgttgaagatgtgacctctgcactgaggtctctataaaactgatgctcattgcgaggcattctaaaagatgacatatttgttctccatctagcagtacgatttgcctctgcctcaagattaagggatgataaatatggaaaattggttctcactctactcctagcaattctctccagttgatgcattgaaggtaaattggatctccatcgagctgattgatttgtctgtgtatcatttgataccctgtgtgttgtaccagaccttctgtcatataatggcactctgtgtcttgaattagtcaaaaaactagccatacggttaacatcttcaatagagataaatatttcatacaagaacgaggacatcaagtcagcaagacccccagtcaaaatggtatctctattgtaatctgcaacagaacttgaatggattgagctaaaaagatcttccaagcccctttcttgttccatccttatccaatcacactgtcgcgagggatccacctctgatggtcgaacagaaggatgttcagacctagcatgcttcctgagttctggatatgtcccctggaattcacatgtttcagaagaacaactccttagtttagaattcatataccttcgagcaggctccaaaaccatatatccatatatttctccacggcaaaaagggcaaatgagctttgattgtaactggctcccacattgagtggggtgccgagactctgactgaatttctctactgtgagagactctgcctgtgacaggaatttcttgcagtacttctgatgagagatgagaagcaaaggacttacaaaactggtcaaggcagttggagtggcggtaactggtattgcacatgtaagtaagacaacccttctcataggaagaacatttcaaaagaacactattatgagggggttccatgcaaataggacatctagcttcctcccattcttttatttcatcagctgatcccaacaaatttataggtttatgcagctcaatgtttttggagttggatgggtaaggatatggtctattacaatcagtagacggggacttcaatcttctaactttaggcattttgaaattcaagatgctgctaaaaacaagatctgccttatttcaagcaaccaaaattaaacggattacgtaatgaaatagaaattctctgcctctttatcctgacacaatttgtatacaagaaaagagtaactgattcttgtatctattcacaaatattgaggttttgaagatttcattaacctagcaatctagcatagttgacgattgcataaaaagtttataaatttaaaagaaatgagaaggcacaggaagcactagaacataatgcagaattgagtttctagtaatcatggatcaagaagttcaagctgttaatttttcttataaatagaatttagatatcaacaatttatacatgcctatataattctgacatattccataaacaggaataaatagtacattaaaaattataaacataacatgcactttctttggacacttttattgacaattacaaaatttcaaattaattaaaacagatggaagaacttcattttgattaataaatacttaaaatctaatggcattgtgtcacctgaaggagacatataagcactagaaaaaaacatcaatccacaaggaaaaaacccataaacattcctgtatttcacccataaatctttttgccttgtaaggaggggtaagttcaattttttattaaaatagcaaagtgtacttaaatattttgagatttgatatgtactacagatatctactgctgctgcaagtctcaacaaaagcctgaaaacttaatttcacaaggtactcacatgcatgacacaaggtaatgaaggtatttatctgtggggaagaaaaccaaaactcaaaacatattagacagctatcaactttcactttgctagtgacagaataataaactcaaaacaaaaggaaaatatagatcactgtttattaaaaaaaaaaaaaaaaaaaacataaacaatactcagcatttaaaaagaaaaacctctgcagacccctataaaactattattagatataatattatatttggaatgatctagttattgatctatcatagcaaacacaggaaaaagctatcaacgccaacaaggaaaggctgtgaaactaaacatgtgttggaaattcaagtttgttcaaagttccacattagttaagaatgggctagatgaaggtaacataagggaacagaccaatatacccaattccctaaggttttgggtgaaaatgtgatgccaagttcactcttgtagttcattgctaggcccaatggtgcaggtcttctttgctttcaggctcccctggaccccaacaagatgctgtatcaattttggctggttcctctcttagaggcttttccttgcctttacaacctctctacagtgcatgacacacccataaaaaaaagtattttattcagagtcatattttatcttgagattttcagtttgatagatgcttgagttatagagaaactggtccgtgtagatgaagttaaaggcaaaagctccctacaggcactggggatttttaatacctcaaagcaagaggtgccacaaacccttaactacattaagtgaattaaaacccctttagtctttattggattctataaatttctcacttctcactcaaccaactctagtaggaaagtttgaactttggattctgcttacctgtaaaataattttgtttaacttcggacactctagtctcttaaccccccaaaagttcactcttgaaaaatacagacagaaatggataactctctctaaggtcaagtcctttgttttgaggcaacagtactcaacaggattaatacaagtgatttgctgcataagtgggaggcatcgatcgctctttatcagacacgcatgttctcccaaacaatttactctttcaacataagaaggttacttccaatgaaacaccatttttctaatttttagggcccttggcaatcactgggtgcgtctattccttctacttcggagtagttttaggttttttgctataaagaattaggcatataaataaacaagtgccgtctttaacaatcagcccctaatagtctaacacctccaagaacaaagcaacggcttaaaaatcttgtccttcacaatgcagtacaccttacgaagaaacagaatttgacaaaaaaaaaaaacgctttcaaaaatgtttcacgattgcatgcagtgttgcaattgaattgatcactaatcaggaagttatttaaacacacacacacacacaaacaacacagcaatttgtttagcagaaagcatgaaaccaagcgatgacctaatttgtttaggcagcaagacaaataaattggatattgaacgagaacgtgatgaggaaaaagaataataattgaaagagggagaatacaagaattagggttaacctggaaagtggcgcagtgggattgcaacgaatagagatgaggatttgcgatcaacacgagcaaaataaaaaagggctggttggttggttcgttattggaattgagggattcgatgtaaattgagttcaatcgtagtcttccgtcgctatatcctcagtttcgcttaaatttcatctgctggctccctcttttttaatcacaaaaatattcttaattatttaacttacattacatcgtactcaatcttaaatataatttaataatttaataaaaaaatacttttatcttcttcttaacttaaaaatatttaaagactattatttctttttattctttctgtaattaaaaataaattcatctttttgttggatgtaaactcacattattgatacacactattaacactttttcttcttcttcaatttttcattcatatattcattcacaatttcacttacaagttcatttacattttcactcacatataggtttcaaaactcatcatttgttatattaacatacatatgaatataaactgaattttaattcttaacaaacattttcagcatgtcatgatcagtcttaaggggaaaaaatttaccactaacaatagaacaaaaccataaaataagagggtgacatgatgacaagtattagtcattagcaatgttggtcacacaattatgtgcatcaaacattccaaacttatcatgatcaacattacatatttcacttagttcatctcgttagtccgtaaagtggaccaaaatattcacgttgtctagtttaggactcatgtattccagttcattcattgtgttcatgtggtctcaaacatcaacactattttaatcaacaataataaacaatcagttcatccattgtgtttcttgtggtcccaaacatcaacatcattttatcaacaataataaataaatgattttgaaaattataagtggtcccaaaatggtcccccattgaaatcccattcattaataggcaataataaacaatcaatattaaataaataaccttaaaaagtaacatatatacaaggtcaagtgtcacagacaaacataactctagcatgaacagaaatcatggaacagaaagagaaacacagcgctcgtgaatgtcgaaagaagacaaatgaagatgtttgtgaagatagaacgggaagaggaacaatagagaactcgtgaactagaagagaaatactaaagaactcgcaaacggtaaagaggagtggaacgtgaacatcgtgagaggaaaagaaactcgcactctggacgatgaagaaaaactcaccaacaagtagaagatgaatagtactcatgaatgatgaaaaggaataagacttgaaccatgaattctgaaactaattgggaagggataatttgggttttacaattaaaatgtaaagacaatttcgtcttctcacatattttaatttaccttagttaactacattaataatggggtaaaagtaatgtgaaaaaagagagggtgtcaaactaaatttgagcaaaacacatggggtacaaatgtaatttactctttgatctttgtccttatctttataaaataaagataaataaataaatattatataatcttatttaaaaaatattttgacaaactaagtaatataatgaaactatagtgattaattttttattttgtgacattaatatgggagtttaatataactacattaacattgtaaacttgttttatattatcattcaatcataaattattttaagataattatttttaaaattaataaatttattatgcataataagttaagattaaataactacaaaaatattttatgttgttagtgcatatataattccttttctcttaatataatgaagaaaaaaatattaaataacttatgtttgaaatcgaaaaaagtaccaatttatccaaaaagaaaaaaatgtacaaataaacatgtaattttttttattaaatccaaaataatacataacaaaaaaacatacctataaacatgcatttttacctcttgtaacaaaatatatacatataagcatgcattaaacaaataataataataatttaaaattaatatacatgtcaaaatataataagaaaaattatagccttatatcaagtttagcatcttacccaaaaaaataaataatgcaaacacataacaaaaggaaaaaaaaaaaaaaaaggttagggtcatgagcatggcaaaaaccatcacgtaatggcagtgatattcgtggattagattgaattaattttggaaaaaaaaatcattcaattcaatttttttattttcttaatttatcattcaaatgatttaatttcaacttttaatccaatccaatccaatttaaagtgttttggattagattgattttcaattataatcatacttttatttattttttagaaaaacattaaataaaatataagatatataataaatataataaaaaataatttaaaatatcaaacatctatttatgtgttattgtataactaataatagaatatttaagcatcttcctcaaataatcagtaaaacatttttaattaattataaatttcataaattgatataatttctatgataattttataaatttataagatataaaaataaatgatattataaatgtatgaataaaaatatatacatatgcataagttaaatttgaatcaatttttaaaatcaaatccaaaatccaatttgatttaataaaaaacatcgattttcaactttgttgatccttcaattttttacttttttggattaattttttcgatccttattggattggatcgtttatatacacccgtatgtaataatgtcttctcatttatttttttcaaaatgctaactttgatatattataaaaatttctttatatattgttgtgtcgatatgtttacgtatgtactgcattaaatttgacacattgtaactatttatttttatcactcatttatgtgtatatttttaggcaagacattaagtttgatatattgtaataaattttcttattatacattgacatctgtattaattttagtttattaatttattttttactcaatatgtattttccattttgcataaattaaaattataataaaaatgcaagtataaacacattagtgtctatgtttttaattagtataattaaatttatgataaaataaatattgtcaaagaagcttattcatttgttatcttttttatttattttttcttatcaattagaagcgtactaattaaaattttcctagtttggtcgtttcttctttttctcttatgttcttaaaaataaataaataattcatggactcttctcaatttaatatagtctgcatatcccctaaattactgggcttgtctaatcatgaaaaatgtttttcaacttcagattagctaatttgacttataggtaacccctacaatttttgttattggccattacaaacgtgagaaaatattatcttaccctccccccttctttcccttcaccttcttttcaccccattcaacccataaccaccacatcacgcagcgcgccaccacctttgtccagctttgaacccagcaaccctgataccattgcaacatcgtcatgcaccgctcattgccccaacagtagatctgtgcacgtgaccccttggcaaaaccaccaccacatagttgcaacatcgtgcgaacccttgaccttgcacctctgtccataatgctacgcattctcgttgtcaccgtgaccaaacacctttgatctacaccaatctagacccatcgacctagatattccccaccattcatcacccctacgtgcaaaggaaaaagaagaaagaaatgggcaatgaaagcttagttatgtttttgggttaaaaaaaaatagattcacaattccgttattatttttttcaccccctcataaagtaacaaaactatgatttcattatacaacataccacgaaatggtgttttagttgtttttattttcacacttgttcagaaaacaacataaacacaatttttctataaaattacaaatgtataatagaatcatatttatgtgaaaagaatattttagagaaaaaaaaaggcgtcaaccctttgatagaaaccgataacaaaaggagttgggtttaactagttaaatatctcgttttctatctatacatgcaatgaaaccaactatacctattatatatattttttttccacaatatataggtatatgtgggaagtctcattttgataacgtaaacttagatattacttttaagacaaaaattatcaatcttattataatatatatatatatatatatattaatttgtgattagatgataatataatatatattttaattaaattcatatataagtttaatcattgaatatctcactttttttatctaaaattaagtgccaaatttaatactatatatacatcacgccaatattgacaaattagggggagccaaattttggttctcaatcaaagaaagcaatcattaatacagggttgcgaattgagtacatgtttagcataaagtaattaataattgttattttgtttatatgcttgaaaatttgtgctaacggaaaatcaaatacgctttgaatccgtgataactatcagcaatagcattatttgtccaccaccattgatttgaagttagttcattctataagatagtagtgcttcattcaaatttatccttattttctcattttatatacctattttaaaagagataaatccaaatttgttgatcatatcctctaacagtgaaatttgaccgaaaaaaggccacgagataccaaaacatcagaaaagaaaaattgaactactatttttaatagctaaaaagtagtaataagggaaccagagaaatcaatgttcagagaatatgcaccacaaaagaagattgccacgagtctaaaagaaaattcattttcatcataatatttcaatatattcaatctaatatattaattaaatcttacatattgacccgtctacaacacgggctatccttgctagttaagtttgaacagaaagattaacgtgcaccaagcaatgcaaggaaaaagatagtcacttttcatcataatggttgcaattatatttcatcattttgcacatactaatggatagatagatagtgtcatgcacagcatggaatgcgaagcttaataagcccaactagacaataccaatttgaacagtgggttttatattatttttttcaaaacattataataagccaatcttaaatatataaatacttcccgatttcaattagcatatgaagattttgggactttgtcaactaaattgctgaaaaaatcgaatattaatgaagtcattaagcactttgtacataaactcttatgattagttctcgatcattcttctgttttcaggataaattctacctattgtgcctcataaaaataacaaatgggttggtggattattatcttatcttcataaagattttgataagaatttatgttatattgttaaagattttctttattccccaaactaaatacaaataaaaataaacaaattagcaaaaacaagattcataagagggcaaaagaacctaaataatatttcttttctaaactaggatgtccgattcttctcctctcaattttgagcgcgtggccaccggtttcgcctcaatcggacatcccaatcaaaagttatgatttttcaaagtttatatttacatcgcgccacttgtgcctgaaacacgccccatgcaagcgcgtctggctgcaccattttggtaaataagtttgaaacagccctatattggtaaataattggaaaaaaatattatttaaatttttttgccttcatcaaatagacctttggtttccctgaaaaattaaaccattgtagatatttaagtccaaatatgtcctcagccgcataacaaaaaataatgtggattagacttaaatttcagtgagaaaaggataatataaacctgcatcatcaataaaccttcaatatattaactataaatagatatatttgaattgaacccatgaacttgttgcatggtggaagatcaaatgtttcctttgtattgggaggataaataaatcccaaaataattttacacttctgagttttgatcctataatactatacatgagtgaaaaaaaaatgcctgtgtgcatcaatggaaagaataacaaaaatacatatattaattggttacctattgacacaaaaaagaataaaacaatggagaatcctattcactcatgaactatgaataactggtatcactgatgatcctctgatcaaaggggagcattctgatcttgaactattggactcacctctatgaggcatgtgaagtggttcaattgttaagtccccagacagacttgctacatttgaaagactagagctcaacaaagtggtgcttctaggagcaaaggatgatttagagcgggatccacttcttggagacagattaacttgctccaaagctcggaactgaagctcacaagggtagtctctcacacagccaatgcgtggccccgctccggttgtccatttgcaagacaactgcttccccagttgatatgatttcatttctttatgtgaattgattctttttagtatggactcttgtggaatggtttctacatcattgtcatcagataagtttttctctgaatttgtatggtccagctctggtacaaatgcttgttttgtttcttgagattccatttggatactcacacagctttggtcactcccttctatctcattttctagtccttcaaacacatgacccctttttggtatttctagattgctcagttctcttccaagaatttgaaattgccttgtgcaaggtgccatcagtgcagaagacctctcggtttcgatcaaattggccttctctgctgcaactgagccttcaataatggtctcttcaatctccaggccattcatgttctcagtgaagtcctcttcagatgagtggcttctaagatgaccactacttcttagagaaagcaagtcatcagcctcatcaactggatccatctgcatataacaaaatgaatttcctcagaatatattgtttcacatcttgtaattacagatctaaattataaaccattacaaacaatactaaagtaatgtaaagcaatggttctaagtatctataccttgacatctgaaaggctcacattgttctcctgaaggaatgaaataaattccttaaaattttcttctgtcggacgataatgaccactgtgaggccaaacagcctgttgaaaagaaacaacaaactcattttctgagcatataaaataaaaataaaaaaaaagtagtcatctatggctataagaatccagtaaaagagtaatatatttacaagccttatgccagatttgtaccttcaagacaccattttcaatcactagtctcccagcagaagatgtggctcctccagccaagaagctagaatgctgaaatgaaccttttgtcttcttgccaacatacaatgtcttagatgtgctaaggacaaaaatccacttggcatgtgcatcttctccagtgttaaggagctctcctgtctgcttgtagaagaactttccatcttccacaataacttcataagccagcctttccatctgtaagaacataaaatgaaaacagttaataacaattgaaatcaaagaatctccagcaaatttgtctatcaagagatgtttgtataaattgcggaaaccttaccggaccaagatatttaatgcactgctgttgaagtttggaacgagggcacttctcaagatttacttcttttccttctcctatatctaacctgcaatttcaaagaagcttaatttcaaacacatgtgacttaagatctatataggagaaatataagttgtaactcagaaatatattttacaaagaatgttaccagtagaaaaagggttctctgctctgacactgaagccacctatcgtaatagaagtgtagattatgtccatagcgatggcgtgggtcaatctatcacacagtaaaaaaaactcagtaagtaaaaattgatgaatgactaacagaccgatacataagcagaaaaaaaaaagctagagcagccatgtttgactaaccgcttcaagccagtgctgtaaagcaagtttttgagctttatcatcttttgataaaccttttccaacctgcaatgacagagcaaattttaattcagtttcttgcagcttgaaagtttgaactagcaaggtagagcatagtagttattgaaggtattaaccttcaataatcaccattattacccttccaaagctaattatgttaaagtaccttagcagctctagttctggctctagaccaacgcgaaaccgcggtttcatgtttctcaatctcaaagaaagatatggagctgcgcttgagttcagcaaaatccaagagcttccacctataaaattaaagattaaaacatgtcaaaaacacatgaaattttgtaaagaaggaaagagattctcaggcaaataaaaaaagtaccagctttgttcaacaagaattgcacaatctgctagctttcttctagtgcgaaagctcttgtatactttctgcaatttaagtgctgcaatgtgtttggggctgtttggatttagaagtgctgattggatggtttccacttgacactctgacttaaaaggaagataatccatttctttgctctttttgctagtccttgagataggcatgttttcctctttgtcaaatgacaaagtgttggttgagataatgttatcaatgtcctttcttttgaagctcacagatgcctctattgtcatctttccagaacctagagatttaaggatggtgggttctaaatcttcgttcttgaaactgaccgatcgcattggagttttgatttcatcattgccaaagttgatggattttacaacaacggagtctaagccatcttccacatcattgtacttggcaaatggacatgagaaggaaatccccatatgacagcaaaaccaatctgcagaaacttgtgcaatccgtggtcctgaaaattgcaaagtcaatattaaagtacaagatgatgaatttttcatgtgtcaaactggatggaatacgtacatcaatgctaagaacaataattcgaaatacaaaggttccaaagccatcaaattcagaccgtactcacatcacaaccacacaatttacatcaagataaatgaatgttggaaataaaaaaaaatagaaaaataaaattcttaagacccattttttagaatgcattgttctatttattatcatctaggcatgaacagcagcaccgtaatcctcatcgaactgatcaacaagaactcaaattctatgctgcagcaaaaccatcagaaacaaaaggatcacggatccgcaaaacccattagctaaactcccatttttaaagaaaaatccaagaaaacagtctcatatccatgaaaggagaacctgaaacacagtaccaaggaaatcccatttcattctcttaaacagattccaaacaaaccaaacaacagaaatcaaaatatcacagataatcccagttaaagaagagcaaggatctaaaaaataatcaccaaaacatgaataaaaaaatcatatttctttttcttcacggatatttagttagattgggtagaatagcatagcattcaaacattcagcacagtatgcaatatgcagaaatggatatacatatcatttattccataaaaagaaacaaacatattaaaatagattcttaaaagcaaaaggaaaatgaagagtgagttgatgaagggtggtagagtacctgaagattcgaaaaccaggaaggagaaaagagaagaatctgtaatggggttgatgagatgagaaaatcttaatggaacactgttactttgagttaatggtaagatatgatatgatatgatagtgtttgaaatgttggtgcaggaaaattgaactaagtagctaacttgcacttattaacaaagttaatgggatcctttgctattaatcacttaacatatttatacatgttaggaggagaagaataagatatgaagagaaagtgtgagataggaagtagagagagaaagaaacagtgtttccactttccaaccatgtggagtcgaacaagtatactcaaattccttttttttttttcttctgttttggttttgggattattttccctttatttttataaagaccatggtttggtatgtggcttctttaccaacagacccatgacatgacctgtacccttattttaatttcttttctttttttagaaactcaaattgttgattttattagttgtgaacttgtactcagtttttatgtatcgtttaaatttgaagtgagataatagttacaaaaaaatttaatttttagccttatttaaataataataatttcattatatgtactactaaattcacttctgacttatgtgtatgtccttaaaatcctttcaacagaaggttagattcatttgtcgcaaaaattaactaaaataaaatattaatacaaaaataaaaatgtcaaattaaactttcactctaaatacaataagagtagtgttaatctgcactcacactggcggatgcacgtggagggtgtgagggcaattatctcataagaattttttttttatttgtatatgcataataaaaaaaattgaccccaccaaaaaataggtattgtcttataagataactttttctaaaaaaatgaatctataaaatatagaaataaaattttcttttttaaaaaatgattgtggggcaattatccttttaatttccaggtttaattactatgtttgttatttaatttattttttcaatttgatcatttaatttattttttgattaaatttagttccatgattttagatggtactaataaattaggtgtttgtttttcgataaattaacaaattttattttaatctttaataaaattatttttgtgtttgagttccaaataaaacaaaaatatatattttttaatttttattattttgttttaatcctttatatatatatatattcatttttatctctataatatatatagatcatttgttattagtccttatcaaatgtttttcaaaagatttaatataaaatgaagaaattttgtaaggaataaaataaaaaaatagatatatattaaaaggactaaaacaaaataaacaaaactaaaaataaaattttaggtttatcagatatttaataaaaaattattaaagacgtaagatctgctaatttatttagaactaaaatcatatttaaattttttaaatcaaattaaaaaatttaaaaacaaattaaaattatttattttcctcactgataaaaatttctgcatccacactttctccactccaagagcatttgttaaagaatatgaaacataaaaacatctgataaattaagaatttgaaaaaatattactatcattttttacgtttacaaatgttcatttgttgatatttatttaattataaaatgaaatagaacttggtgaactttttctttcacgcgtacgcgtagcgcttaaatttggattcttcaaattatatataaaaaaagaattgggctagtcaaagagataaaattagtaaataaatcatattgtcgaaaagtactttgtatattcttggagttcaagtgtcgatccaatatcttaagcaatgtctctgtgtttggaaagtaggtatgagaaatgagataatctcttttaaaaaaaaatattactatttaactcatgttactttatatataaaaagaaaaatgagataatttcattcggtaaaaacaaaacaaaaactttgcactaacttatacaagtcttatctgtctacaacattacttaactgtttccgtaaattatcacttttaatatttcgttttttattttcaatactatttaacacatattactttataaaatgaaaatatttttatatgtatataaaaatgagaaaaaaatatataataaattaacttttatcccatgcaattaaatgtaaaatacaaattcatttttatagtgagactatcaaaattaaatgatgttaacttattttgttaattactatgaattaaattttttcgcttatatttgattttggagtatatttcggtctatcttatttagactttttttgtcaattaaacgtacacttttttgactgtccaattaagaaaataagcttcataatgttagtaaatttatatttgaagcattaagtgaacattaataatatttttttaaaataaaatcacattctttaacaatgaactttcaaggagaaatattataaatattattattttgtagatatccatcatttattagatttaatttgatctattagaatatggatatgatttaattactctttgtaatttaaaaggatattttataaaatcagagtttcttaattaatttttcttgtaattatcttttatttatttatattttttctctgaatttttctttctactttatatacgttttttctttcatctgcattctttgtataacattcacaaatagtttatttataaattattattgttaattattgatatgttttttagtattatattgtaacaattagtgtgtctattttattttttgggcgttttatgagttaatgtacataaaaaaataaaaaaagttatttgatttgacttgcggggatttttcttttataacatattaacctccaatgaaattgtggataattttctaggaaataatcctcgctttctagttcctcctttctatgaggggtcattttcatgaccatgtcttgaagtaaacttcaatccgttccaagtgagaacgagattgactttagcaaaatcaaccattaattccaaactgcttatgtcatctcagataattcctactccctcgaaggggtagtacgttacgtagtttaagtattttaaccaccaaacacttgtcaattattccaaagctaaccattaatttgcatatatctaattgaattcgtggcatatgaactttctgcctgctgtggctgatttggtaaagagtatataaggagctcattgctaacgaaaaatgttgcaattttttatatgttcattgcgtactgtaccttaaaaaagattgttaatttgaggtgcatacaaagttatcaatttgaaattgtgtttggggatgtgaaagctaaaaagttggaactttccttgtaatgagatcaggatgtcccacaggctctaaacttgaacttgtattgtatcattggcttattagtagcaacaaaaagtctttttgctagcaggccaaatagtcaaaagggatcaaccccatgttagctctttaaatacacagcatatattatctgtaagagaaaatattaaatgaataaaactttatctcacatggtgatgaattataattaattttgctatccttagtcctcactatattagaaattgtataaagtattgttacatttgttatttccacaaattttaaaaataggaggttaagaaaaataaattcatataatcaacaggaaattagttatagtttttttttattgcaatatcatcgtgatttgtgaatgtcattgtttgcaatatggtcatataatcgtaactgaattaaattataattatatatgattatggcatctttccatttaataattttttataataatatttatattttttgtaaaaaaaatctataatcaggcttattattattattattattattattattattattattattattattattattattattaaatccatttacaccgtttgattatcgttagcttgatgatttgccttttaagactttgtcccgtatagccctttacacttcatacggtatgttaagcatgggtacgtatgtgtaaagcatgtataatataaaacaaactaagtaatatttatgattactaatgttgcaaaatgcaatggtaaatagaacaaaaatgaagtgaaattcgttaaaatttaaagtatttactgaataagttaaactgacaagaattgttcatttatttaataattaataacaatattaatttattctaataaaaattataacaaacagtttatttgtaaaatattttatatgattacaagtctaaatgttttggcgtttttattaaataaaaaattactttttatagttatttaaaaaaatggaaaaaaaaacatttttaaaaaaactaaaccaagtatactatcaatttcctgccaaaattgaaattagacattggcattataataattgggtatgcaaacgtacggtgttggaaagtggtgtacagcatatgcataagttggtgagaagataatatataaatatataattaaactaactcttccctcttctgtttttttaatatgaaaattgaaaaggactgctttaggtggtaattaaggaaacatacgttaggaatctacgtgtttatgtttcatctttcggtcatttgatttattcttctgattcttttcctattttaaaaaattacaagtatatctatcaagccagcacatattaccatttcagattcaataaaaactatgtatgacgataattcaaaccacaagatctatatcttcaataaatgatcgagcgaggaacgttcacattcggcactgacacattaatctattttagtttaaagtagtttgaacgaatttaaattttaaaaataaacttaaattatcttttgatgaattagttcaatttgatccaaaattatatattgtttaaaatttatttttttattaacaattatatattattaatgaaatgtattgacttaattaatattttacataacatgatattatattcatattaatattatttattttaaaatatatattgtaaaatatattttaaatataattttatagcctaattatatttaatgttgaatataatacattatatatacaaattaaatttgtaggcccggatcaagacatattttaacataaataattttttataaaataaataaataaatagaataaaatagtaattactagtagaaattccatgcattaccttgatgatttaattatacgaaattttatgtataaaggaagaataacggttgaataaaagaaaaaggaagaataactgtgtcaatttgcacaattttgtagacaacataactctctataattgtctctcccgaatgtgatattcgatttaaataattgcattttgtacaaaaaaatcataaacaaatatgttttcatttctataaattattagcatatttaaaataaatttaaaaaacaatcattatagagtttataatgatgttttacgttgattgctttttctttttactgctatttaccttgattgttttgcttacaagtaacgacaaccaaaaaatggtactacattgtatatattaattaattttattaaaactatataaaatactatttccgtgagagtgagaaagagagtactacattcagtacattgtgtatacttatttatatgaatcaaatatttacacttttttaagaaataaatgctgataagaagcaaaataaatctataactaacagttattatattttaaaactaactaatgggcatgcaattgtgaagctagctagccttaaaaaatttgatatatatatatatatatatatatatatatattaggataaaatatactagacgttatgaagtctgaaccataataaaaggatttaataacattataattagatagttagtataatgaattactcctaaatcctaattgaactgaaccagcttagctttacaaatgaagaccattgattttaatccaatataggaatactttatatttccctcattgatcagtcattctcttccaaaccaaaatctaaaaaattcatagacatttgacatgcttccacgtgcatcactggagggaagggggtctcttatttatatttgaattttgtgtttaatccttgataaaaaaaaatttcatatttgcttcccaatatttgaaaattttgttttagatttatgttgtcagttaagtaattacgtgtccattaaatatttgataacgcgatttgtgatgactcaaaaatcgtcagtatttgtttcaaaacaaatattgtttaaataaaaaaaaaattcaactttttaaagggaaggtcctctcccccctccttttccgcgaccacctccttctttgtgtcgctgccttcaatcacttatgttttgtgtcgctgccttcaaccacttatgtgtcctctttgtctctgtcggtgttgatttgcagtgggcccccactccaccatcactgtggacttttgttgttgcattcgcatgtcctagatctcgaacgccaaattcccacacgtgccttcccctgttgtagttgggcatctgctcaagcataagaatcacgggatgaagctaagggaccttgcataaagccctaattaagatgttgaaagtggagacgtcgtgtgaaacagcgtcagagtggagcgttttgacgagcctgagcttgttggctttgacaaagaggctgagggcaaagttgttgaagcgcgtgtcaggtttgatggcgatgtcgcactccatgatgaggaagagggggtcgatttcgccgtgtaggtggtgggaggtggcataggtcttgaggaagatgagggcggtggactcgtcgatgaggattttggaggagtgcatttggcagaggaaggtgagcattgagtcgaaggagtcagtgcagtcgagttggcagaggagcacaggaagatggaggggtggatctagtagttgggctggaccgaggaagaggcaaaggaggtcgaggaactgggaaggggagaagtatggggaagggagtggtgggtgacagaagtagaagatgagagctagaaaaggaggattcacaatgtatgttttattcattttctaactttaattgattatgacggtttttaaccgtaaaaaaaataatttaattttttaacaaatattaatattttttaaaaaatcacaaattatgctatcaaatatttaactgatatattattacttaattgataataaagattaaaacaattttttaaaaatatcaagatgcagatgcggaaattttttttattaaaagatcaacgtaaaatctaaatatataccagaaataaaaaaatatatttaaataatttagaaaaagtatataccctgaatacacctgtaagtcaaaccgaaactaaggaaaactaagctaagccagtaagccaatttctttgcacttgtgtctgttcttaaaaggtaacgcagaatattttaagaataaactttatgcagaaatgaattttttattcaaattgaccaaaataataaaataaatttgaatgaaatcagaattattataaaatagatagatacgttttttctcttaaaaaaaagtagtgaaatgatgataattagattagatggacaaagcattgtcacttccaactgtcatatttcagatctccatgcatcgcgtacaagaggagtacatggatgtgcacgtgtcgaatgcagagtgggccacgctgcgctgccaccatcatttggtagcaccgtaccgttcccccagaccacaaaatctcgtcgccagtttctgctgtcccttttacattgtatcgtatgttttgctttgatgtaataagaaaatttgctttacgtacattgtattgtatgttactacgttactacgtgcgtgtttgaaaatcaggtgtaatatcttatgttttgttcggtgggggaaaaatagtgaaaaaaataagtcagaaataaaaagataaatgtgtttatgagagaagagatgacaaagatataaatttaaaaatctgaaacttgttatttttaacctgttttgttcatttatttacatgcatctgtttttatttttttcttaaatcaaatatctttatcttcacattattttttacttatcctagtttatcatttttttttcgttcaccctaaaattttctttcatgtattttcaagtatgattgaaaatcatggtaagagtaaaacaaccaaacgccaatcttaaacacaatgtatgttgtgtataaaaaacacaatgtatgttttgtttagagtcttatatgtaacctgaaaataaaaaattattttttaaaatgttagtttaagaaatgaaagaaaaatgtttgttttaaatattattatttaaatataaaattttaattttatacattttcagtataatttttttacaccattaattaatttaaaattatcatatatataattattataaaaatcaatcatttcattatatttgataattaattattcaatgtaattgtattttaattaaatttttaatataatgttaataaatgtataactagacaaattaatcatcttaaatgttttgtccttactacgggaaggaaaagaaagtagaacaaaaataaaacgaggataattatttaaatttttgtttagttaaagagcaaatgaagaagaagaagaagaaaaaaaataatttaaaaataaatctggtcccaaaaaaaaggataaatcactaatttagtctataagattataatgattgtttaaattggtcccaaaaattaataaataataaaatagtctctaaaattgaaattgttgattaatttaatctctgaaattgtaatgatcaatcaactcggggtctcaatttttttaaaagaaaaactgaaaaataatccctaataatataaatcaacaaccaaattaatgtctccattattaatggggtcagcttcgcgtctttttaaaaaaaaaaaaaaactaaattagcatgcatgttaagtgtctaactagtagccgattaggacacatacatgcatggttatcatatcatatggatgaaattgaaaaaaaaattagttgtgaggagttgggtaaatgcatgaaaacttaagtttgattttcatttctgttattgtataaaaaaaactttaaattcaatatgaatttaaattatattttaattaaattcaaactaatataaaataaaatatccatggtaataaaaggtgtctatatatatatatatatatatatatatatatatattttcaaatcatcatcattaattaataatgatataaatatagataattaaaaatgaaatttttgatatataatttcatatataattttaaattaataataataaataatttttaaaaaattatcaccattgaattatttatattagtttaattatatattacttattgaattatttccatatataattaaacttatatataaatatatcaaatatccattttaatatataaaagataaaatttccaccaattcattttttacatataattataatttattcgaaaaactgctcattattgattgttttttattctcatcttacaaaagacatgaaatagattgataaatcatacatgcgtaccacttatttttcttaatgaataaatcaggagtaaatacgtaatactgatcaatatactagttacatataagtagttgtcgcacataaaattaagaatagaaactatagcatataggaatgtgaggtaaggaatgagaacacatataacggtgacgtcgtatagaggatgggattttaagatgaggaataaaagcacataaagaatcggccaccaaacgagaacgtagctgtagtgcatgtttctcaattaaataatgccagctggcctataaagtgtcatcgatttttcttatgttttggtcactacttttctactgattcaccggtcactactagccatgccactaatgtgaactcttttttttttttaaaaaaaaaaaataagtttccctcccttggatataaaggattcattatggttatagtaagtctcaataaggtcattaaacatttataaaaatatttataaattatgagtacgaaattcttatattaataataggaactaaactcatagtttaaatatttataaaaatacttataaattatcagtaacgaaaattcttatattaacaataaaaattaaactcatattttgttttggaatgaatgtgctatttatcaacttttgttggtccctaatgtaaactctgaaatgaaactgaaaagaaaagaaagaagaataaaataagaccccaacgcgtaacaccgactcaaacgtttgtaggtgagtttttttcttttttttgtacgtgtttcgagtgttttgaccgtacgaaaagttttgtggcttccaaacaccataaataaataacccaaaagtcaaacactagcaacccccagtcattaattcatttgtttgacgttgattggatttgcttctgattccattctacgttatctttatcttctaccgccgcccaaaccatacctctatttttgtcttcggaattattatgtctaatgtaattcacgtctcataaaaaatattattttaaatatctcaattaattttattattatttatttttctatccacttaattattttttattaatatttaagaaagaataattaagtgaagatatatagagaaaaataattgttgtatctaaaaatttaaaaattattttataaaatgaattttataattagtgacaaaagaaatatataattaaaaaagtctaattcaatttattaaataaaatatgtaatttactgtaaatttctttttatatttatcttaagttcatacgaacgaaagtataatcaaaacatatatcttagttttctctagtaattaataggactccttacattgaatttcttccccaaccatttcaacgactcataacagaaataaataactaaaacgtcttgctaattattaactaagttatgaaactagactatatattagcacagtaaacttatcgccttaaaaaaacatattaaatttatcgtgtaccaatgacttgatagggttgtttgtagcgttaaacaattggaattagatacggatgagtagaaccaaatagaatggtaaacaattgtcattgaagtagggtaaaatctatgatttttttacactcttttgtgatttacataataaatattttatttcaattccttaagactagttttataaaattattactcttttatttatttatagtttattaatttttcttgatatatattaaataacacaagacagtacttattttgggaaaaaagtaaccattagattaaaaaaatctaacgtattattattaaccttatattttcttgaatcctaccgataaaaataaaaataatgattagttgagaaaagagagagataattgataaaaaaaagtaagaataattttaaaataaaattaagttattgacagattcattaatttaatatctttgactaaattaactaaatttttgtaaaagaaatatgtaaagtaattaaaaaaatcataaaaaaaagacgtagggtacacgagtttttgccttgaaatgtgtgacaccttttatttattcgtttctcagttgatgtggtcagagaagcaaaacgtcactccgatgcttcgaggtttgatgtaatctacgacaaaatattaatgttgaatacaatgcgaagaaaaaatagtaacaatggcggcaggtaaagggaataataaaacttttattaattaatcgatatactccaatatacgcgcacgttatatctttgttgccagttggcgatatataaccgtgtgagtaaaatccagagttaaatataaatttagaggtagatattaatattcactagtattgagtttttggacaattttaaataaccaatcataatttgtttatacaagtagctgattataaaaggtgaaccaatttatgtattgtgaattcaattaattatatattcagatagattttatcaacaaacctatatcaaaattaattagatcacaaatgcattttcattcataactatgatctagagataactatgctcataaatgtattttaattatatgtctagtgcttaatttttaaaaaacggtacttcataggcgaagtaatttatggagtgatattaacgaaaatgcatacctaactattttctgtattagtacatatgtttttataaatttgaaggaaactaaaaaataaaaatatatatatcaacactaaattatgataaaataaagagtcgagatttaaaacttaaaagttcaatacatattttaatttgatcgaaataatgtatgggtgcataatcattatctttatgaatttaatatagagagtcgagatttaaaacttaaaattcaatacatatttaaattatatttcaattaaactccaataacaacatttgaaaaaaatgaatagtatccttaatataaaagaagttacctaatttaatagaaaaataatttttaagaatttattcatttaaaaataccaaatcatactttttttcttatatattaaaacaaagttttaactagctaaacacatttcaacagttgaaatatttttattcacacatttccttcttttatcttggccattattttatatatatatatatatatatatatatatatatatataatacatttaccttctctcttataagaatttgtgtgaaaaataaatcactcgctcactttttaattagtatgataatcataaattatataaatggatttgatataaaccaacttcttcttcttcttcttcttaaatgttgggagggataaaagatcaaaagttaaagacgtgtctgtcctgttgaagctggatcagtaaagacagttttaattaattccactctcaattctcaaccaccttccacaaagaatctcaaattgttttcaaccaatcgtgtttgtttagtatttcgctgtcaattcaaagtgcttttacatgcataaaaatgatatatatatatatatatataacaaattaattttatgaaaaattacatttgaagtaatttgatcttaacaatcaacacacatgtatatatagaaaatgtatcacatgataaatgcagcatacaaaaagagcaaattcaagaatataattcacacaaatgattaagattaaaattaattaaaataactttgatattctgtgtttttaattttttttttttaaaaaaaggcttaaacaatcaacctatatatctcttttactcttaattgggtccgacgtttgttttaaacaaatgataattgtcaactaaaacctacgttacatgtataaagttataactgtacagtttacatagttgaaggtacaacggtttcctactaatttagttgtctgtaaatgaatatttgttatttaacctaacagcagtttaatagtcatgtacacacaaagtgactatagaatttgctcaattaactttagttttttttatatggttcaataaagtatacattagttttgggttccatcaaccacttttatgaatatactttagtactttaattacaactagtagagacaatagaaatgagtaaatgacccaccagatcctcttgctgctaaattgttggcaccatttttcaactctcattttcgtgccacttgttattgccgaagcaaattttcaaaactgatgcatgcccctgccccctatagtgtatacttgtcaagcaagaatttttgggtcaattgtcaacacagttgaacaaaaagtatgcatattaaaaagtagcaacctcactgtaatctctctttctttctaggtccacgtcgtcctttatttttttttaccaaataattcgttttttggtctggtctttgttaacacttttgagcattaatattgaccaacctgacaacctaacatagtatatatcttgaacccgtcaaataatcagaaaagtaacttaccaaaattcaaaataataattataaattatgcttatccatcccaatatttttttaacataagatatttttctaatgaaaagtggtagactaatttcttaatgtattaaacttatttaagaggttaatctttcagtacatatattctttatacacaacaaatttgatgatcaaatttctaatcatatatttagaaaatagatatatcaactatatacacaacattgatatcttcgtctcaaatactaatgtacgtgattttggaattaagcttttgtgccaacaaaattaattttgaaacagtatgatttatgtttgtatatttttattataaaaacaaattaagataatagaactcaatataaaatttttcatcgaatgtaaaaacttacttaaaattgtttaaatttaaaatcaattttaaattatttttcacgtgaaatcaaaatatataaaaaaattatgtgtatatggatacacgtatcaaattgacgtgaaaaaccacgtcttcaccataattccaaacatattatatataaaatcaattttaaacttggatctccaatgcgaaataaaaaatgcaattcatgttctaaaaacttacacgcgcgcacacatgtattttctgtaaactttttagtcatttttcttataatacattgtaacttattttatagtttcaacgaaatatctaaacaaaaaaacttgattcgatcaatcaaggaattccaattcttccattttctctcgtttttttcaagttctttctgcctgtcaccaaaccgtatctgtgtatatatagtaggtccatgatccttgtgagacaagtcggtgacttggtcttttatgcgatttgccactttcacaaaaaaattgaaccagattttaaatgaaagtgaggaagcagccacgaagttgcttgaaatgtgtgtccatgttgttgggaaaaattagctttccctcaaatagtaccgtatgtgaacagtaccgtacgtacacgtgaatagtacttttcagtatgcttttgcggaagcgaaaaattataagagtggagagaaaaacacacaggaatttttacgtggaaaactttcccaatgtggagaaataaaaaccacgggacactagtccagatcaaacttccactataaaaataatgggttacaacaaatcaagcttcaccataaatttgtggtactctcaaacatcacctatagtggtggtacactcaaacttctcacaagaggtctctcaaatcaaacatctctcataaggatttttctcacaactcacactaaactctctcggagtttttctttctcttggtgttattgttgtgctctactggatgcccaaaaactgaatgcacttatttatagtgcaaagggcgctgcatttggtgaatcaattgtcaaaaaaatattgccacctaccgttttgttgttcaacatttgctgcgcctaatgtttggctgccacctaccattttgttcaaatgttgctgctgcccatgtgctctaattgaggaggaaaataagccgtgggccaacagatctccccctttccgacttaattagacggatttcaatatcagcccggcaccttcgcaacagtcttcaaattttcttgctggtaccggcttagtcatcatgtcggaccaattaaggtcagtgtgcactttgacgagtttaagctgtccatcatctaccacatctctgatccagtgatacctcacgtcgatgtgttttgtgcgagagtgataggtcgagttcttggctaagtgaatagcgctttgattgtcacatttcagctcatacttgtcttgatcatggccgagttcggaaagaaacttcttcatccataacagttctttacatgcctcagttgtggctatgtactcggcctcagtcgttgatagtgcaacacacttctgaagtcttgattgccaggagacagctcctcctgcaaaagtcatcagatatcctgtcgttgacttccttgagtcactatctccccctaaatcagcatccgtaaagccttgtagctcagctttatcttctccaaattgaaggcatagattcgtcgtacctcgaagatacttgaatatccacttcactgcattccagtgttctttaccgggattagacaaatacctgcttaccattccaacagcatacgccaagtcgggtctcgtacaaaccattgcatacatcaaacttccgacggcggactggtacgggatcttcagcatctcgtctttttcttcatcagacttcggacattgcttctggttgagctttatgtgtccggataagggggtgcttactgttttggctttgtccatgctaaatcttttcaagattttctcaacatatttttcttgactcagccacagtagctttctttgtcggtctcggatgatcttgattccgagaatctgctttgcagggccgaggtccttcattgcgaaggatgagctcaacgccttcttcagggcggctatcctcgttttgtcttgccctacgatcaacatgtcatcaacatataacaataaaatcagaaaatctccagcttcatacctcttgacaaaaacgcagtggtcggcttctgtcctcatgaacttgtgttctgtcatgaaagactcaaacttcttgtaccactgccgaggtgcttgcttcaagccatagagactcttattcaatcggcaaaccaaatcttcttgtccaggagcttggaacccttcaggttgctccatatagatttcttcttcaaggtcgccgtgcagaaatgctgtcttcacatccatctgctctacctcgaggtccattgaggctgccatcgccaacacggttcggaccgaggacatcttcacgacgggagagaatatctcatcaaaatcaactcccttcttctggttacagcccttcaccactattcgggctttgtatctaggcttctggccattttcttcattcttaatcttgtacacccacttgttcttcagagctcgtcttccttcaggaagttcagtcaactcgtaagtctgattttcatgcagagatttcatctcgtcctgcatagctctttcccattctttcttgtctgagctagtcattgcctcatcataactttgaggctctccgtcttcagcaacgacggtgtactcgtcaggtgggtaccttgtggaaggtcgtctttctcgtgtagagcgtcttatttgctcttcaagttggtgatccggttcttcattttcatctcggatctcatcatccctgttcatttcatcttggacctcatcatcttggtccgggattgcttgttcattgtcttcattttctccccctgcttcagcacggataggagggatgggttcttcacttcggatagtaacccgaactttgggcttcgagatgtcttgaatggtctcattctcatgaaagacaacatctcggcttctcactatcttcttgttgattggatcccaaagtctgaatccaaactcggatttcggcgatccgaggtagatgcactcctttgttttcgcatctaactttgctcgttcatctttggggatatgcacgaaagctcggcatccaaacactttcaaatgatcataggtcgcttttcgacttgtccagatctcctctgggatctccccttcaagtggtcgtgatggtgagaggttgatcaggtcaaccgcagttctgacggcttctccccagaaagacttcggcaatttggcattggatagcatgcttcggaccttctcttcaatcgtccggttcattctctctgctagtccattcagctgaggagtcttggggggcgtcttctcaagtcgaattccggccgctctgcagtatgcatcaaatgggccgcaatactcaccaccattgtcagatcggaccactttaagcttcttgccagtctccctctccaccatagcatggaattctttaaaggattggagtacttggtctttagtcttcaacaaataaacccacactttgcgggagtggtcatcaatgaaagaaacaaaatattgagctccacccagagatctctctgacatggagcagacatcagtatgtataagatcaagaatacacctgcgtcgtctgggttgatctggtttcacaaacgaaacccggtgctgctttccagctaggcagtgcgtgcagctctccagcacttgacctttcaacccggtcagcgatcctttcttgttcaggatctgaagtcctttctcgctcatgtgaccgagacgcttgtgccacagctccaagctaggttcatctcggactaaattggcttctccgccattaatctttccttgcatcacgtacaaggagccttccttcttgcctctggctacgaccaagtttcccttggccagcttccatctatttccaccgaagtaatttactaacccggcatcatcaagtttgcctaccgagattaggttcagtcgcatgtcaggtacatgtctcacgtccttcaggacaagttggcaccctacatcagaggtcagggttacatcaccgacaccaacaatcttgctggtcacctgatttcccatttttactactccaaaatcaccacttctgtacgcagagaagaatcctctatgcggggcgacatggaaggaggcaccagagtcaactatccaggtgcagtcatcatatgcaacattcaaatagttgttctcaccgattaagtatatatcggcttcagcatttgcaaccaccgccgtggtgctcttgtcttctttcttcttcagcacaatctgatctggcttcaccgtgccatttttctcatctttctgcaagttcctgcagtctggcttcttgtggccaaccttcccacagtagaagcatttcaattcaaattttggctttgactggcatctggacttgtcacgtccacctcgaccccggcttttgcttcgacctcggaagtcgaactttcccttattctcagcaacgttggcttcatacgtgctggttacgcctcgttctcttctcctggaatcttcattcatgaggctgtcagtcacagtctccatcgttaactttccgtcaggagcagagttgcttaaagtcaccaccagagtatcccaactctctggcagagaactgagaagcaatagagcctgtagctcatcattgagcttcatctcggtcttggacagttggtttactatccctttgtaagtgctgaggtgttcaatcatactcatgccatccttgtattccaacttgacaagtcggcgaaccaggcttgctttgttcctgggagtcttcttctgtatcatggtctccaacttcgtccacaattcaaatgcattggtgaactcggaaacatgctcaaagaggcttttgtcaatatatttcctgatcatggccaccgccttccgattcaggatctcccattgtttttcggtctttccatctgggaccttgtcaccgaggatcggctcatacaggtctttgcaaaacagatgatcttccatcatcggtctccagtatgtaaaattgtcggcagtcaacttgaacatttctccatgagaagtgctgccgctggtctccatctcttcttcctcagaacccttttaatcgagctctgataccactgttgggaaaaattagctttccctcaaatagtaccgtatgtgaacagtaccgtacgtacacgtgaatagtacttttcagtatgcttttgcggaagcgaaaaattataagagtggagagaaaaacacacaggaatttttacgtggaaaactttcccaatgtggagaaataaaaaccacgggacactagtccagatcaaacttccactataaaaataatgggttacaacaaatcaagcttcaccataaatttgtggtactctcaaacatcacctatagtggtggtacactcaaacttctcacaagaggtctctcaaatcaaacatctctcataaggatttttctcacaactcacactaaactctctcggagtttttctttctcttggtgttattgttgtgctctactggatgcccaaaaactgaatgcacttatttatagtgcaaagggcgctgcatttggtgaatcaattgtcaaaaaaatattgccacctaccgttttgttgttcaacatttgctgcgcctaatgtttggctgccacctaccattttgttcaaatgttgctgctgcccatgtgctctaattgaggaggaaaataagccgtgggccaacacatgtttcatgtttgacttgtgtttggtctgatctgtgtgtcacagctagaaataaggatctagatcactgattatgatgctggcatatatagtgagatatatatacacgtttatacataaacttctttgtatttttctcccatttgtttgagagtggagttgacaagtgtttagtgcaaaaatttaaggtcaaccactagttaaacaattacaagttacttaatgatcaagtattttcacatagcgcgtgccttagtgtgtgtgaccttgtataataaggtgctttcgatgattgacatgtagaagtagaaatcaacatgtgatgctgcttgctatttggcaaatttcaagttgcaacagtgctatgcaattaattccatgtatggaatttctgtgtgtgggagaggaacagaacatatgtatgtgacataaaaggaaattaagagcataagaattattgcttaatcaaattatctatgtaagtacttaaaatttaataattagattagattagatttaacgtcataaaaggacacgatcaacgaaaaaaataagacatgaaattaataatgtagcacgccatgcatgcttgttgatcgtgtaagtcatgcgtggaggcgaaatagcaaatcaaggagcaggttatatgattttgcaaacacctacagctaaagcaagcagaaacatgtcacaatgtcagtggttgaattaaataaacattgagccaattatatgttcgtcaataattgtccaatgatatttgtaactctaattaacgaatggtccaaaatcccgagttacatatataaccgtgtttgtgatgctctccaaattaaagtgaaagaaaaaaaatgctattcagaataattcaacattaattcatgtttataattaaactatgaatgtataacaaatcaaatgttaaataaatggtcgtaggtgatcaacagataatttcctcactagattaatattgcaggcagcatgtgatcctttatagcatttgcttgtagtaatgtaatgagctatttgtaaccaagcccaatgccaccaaagagctataaagctttgaccaaactataacattactttaatcctagatcccaaaacgagttaattgtttaacaattataaattgtaattttctcgaaaaggttgttagaaaatcacaaggagctaggatttaggaagtgatttgcgctagagcctaaaggctaaaaaactcacaagtcacgagatagggtcaactataaataaaccacaccaaatgaacaagctggcatatatgtatatatatgattcatgcacaaaagaaaccacctaccatctgtaccgtccccaatttgctatcggataacactaggcattaattaggctttcatgactgcatgggctggatcaaaatacacagcttgacaatacaatgacgcgagttagttgtttcaatcaaaactaatatttttcgtattctcatcaccccataatggattccatgtgatcatttttactcaaaatattggtgtttggtttgattgttcttactttttagtgttgatttcaccattttttttatttttttaaataaaatagtgatatttttaatatttattagagaatggaaaaaatatttccttaaatgaaacaagttcgaagtagtgtttgatttatttgttgtcttcattttctgttgctatatatgttttcattgatagttataaaaatatcacattaactttatgattttgtggggaaaatgatgaaaataaaatatttgaaaatatacacaataaaaataagatggcatttttatagttactagtaacaatgttgaaaatgaagatataaaataaatcaaacaacataaaattttcttttgaaaagaaccaaagaaaaagtacaaaatggctaaaggatctgcacgttgtatctcataaaacatgttatgccatctgtttatttttttaaaatgatggtgggtactcatttattttgcctgtggctatagtatttcatcataaatgaaccattactgctgaggaatcctaaacataactacaataaatatgaggaatcctaaaacatatggtactacggaaaatcaaatctgtcaattattttttttataaggtacctttaggacgtggagcacatggaaattttctactcgtcacattgttgaatttctgaattttccagcatgatggttggatcttagaacagctggctactgtaaatcctttaatatcttattcggcccataacgttatgcagcgtgataaacaaaacatggagcttatgaaaccgattggatcgaattttagggacgcaaagttcaattttagtgaatattcagtttgttaaaaattaactgtgattaaatatatttattgttatttcatatgataataaattcatataatctttagccgtatagtttattattttaaatttgaattagctacggcaagcatcaaatcaaatatataaaaaatcaaactaaaaatcaaacttagctcaagacaaaatgttcaggcctgaaatggcttccaaaagtcaagataaaaagaatcacaagaaattagttaaagacaattaataaatcaagtagcatgagtgatggtttaccaaccaaattatttaacaccggcccatggctttaaaactcaagtataatgctgatagatgatcaatcctctaaatactttattttcctgtccttatccaggtatttgtaccgcctaactaacatccatatcaagacacatacatagctagtgaaataaagtataatttaagtccctgatcttcattttctagttacacccaagtcgaatatcttggattaaattttgaggaattatccccatttaactgcatatcacatttccctatctactctatgattcataccatataacgcatctccgattacgattatcaataacaatttccctcggcgggaaaaggtacatgctactttgaaagatgcccctttcaccaagtttatacactatacacaatttaccaatactttaatgcgtgatcagttatcccacccttgtgcactcggtgcaaaatgcacattacagacacagtatccaaattaaaacaaatcaagatggaaaaaagttggtcataaaccattttaaaagttatatctatctctggaatgttacaaaattaagccaatttcctatcgcttaagttttacacgtattgcaacctataaagcgaagaactaatcagacttataatgcaactttccatcacggaatcctatcaaactggtaaattctgcactcttaagtgcttatacttttgttctttgttgaatctttttgcactcactgccaaacctttagataaaaggactttcttatctcaccatcggtgacgattctttccattgtttttcgaaaccgaaggcacgccatctgtggggaataacatgatggaccagcctgggtcttccggcggctcagaagccagcgtcaaccaacaagccccaaaccccgagcccccagagcctcaagcccctgaccttgaccatcctttactggatgacaacaaccagaagcgaagtttcttttctacgatacactggaatcgggtctatcttaagcgggaaggcaattcccttctttcggtaaagaaattctttgaacttctcttgaactgcaattctgcttttcactttgtctaccatcggcggagggcatcccttctcagcttccatcaaccccctcttgcaaagcctcatcaatctgtccaacaagaaaaaacaagaagcatcactgagataaagatttttttattgacttggccagttttcaatatagtgcatgtagcccaatgtaaaaatatttgctataatatagaagtggggtagtgtgcctcttcatggtggtgcttattgcctctacacatatctcatggtattaataactatggctccattgcaaaaaccttgcccttgaattttctagttcagtatattcattctcaaatgggactattagcatatatttatgacattgcactaacgagacaagtaactgcaatcatatttgacatttttcacaccccatagcgaagccacacaccatcccctcttggcaccacatcaccacaatgccactcatttttcccattatatttgaactgcaatttgaaccattggaaccaaattgaaactttcattacacgaggaaccaaaactccaaaagtgaatttaacagtaaatgaagaacttactcgttgcctagctgttacattaaacttttgaagcaaaaatgctttaggatccatttgcccaggaggactcccaatccctaatgacaaagcaaattgaaaataaggattacatcaataatctaaactagggaaagaataaaggatttgcaacataagtaccaaccaattctcagcctaggaaattctctatttcctctgaagtgatagatcacactcttcagcctggttcagtgagaagtgaggaccatgtacaagatgagtagtggtattcgagaagcacttaacaagaaaatatcagagctaaaaagatttcatgaactcattttccatcagactatcaccacttataaaaaatattattgaattataaacacgctcgtagtgatccttagtgtattcatataaagtaataattttttcttcgaatcttagcaattgatatgctttcgaaacaacttttttcttcatttgaattgaaagtaattctttcaatttgtgtattcttatttctaaattaaacaaggctttttcagccacttcataaaaattactttcctttttacctaaaacagtgaagcatcacagatatgacaatatatggccccttgaaaagtgaaaatgtagtgaataattgtgaagctatatatccaccatgaatagataaagaaaaactatgaagaatgactatatgattaagtttccatacaaagtactaatagatgttcatttactgaaagataaccatcaactattgagagcatttctttgagtaacagggttcttgatataaactctcgctggtatgcattttttctaaccatttaaattccaaacaaccacaattggagtcatggataactccgcacgggtccataatagaattgaaataatctataatattgcaatcattagttttttcaatactttaaaggcttaattatcaatttggtcctcaaatttctaaaaggttcaatatggtcttcaataaaaaatgaatcaagttggtccctaaatttttaaaagatttaatttagtcctcaagttcttaaaaatgaatcaatttggtcctcaaattcttaaaaatgaatcaatatggtcctcaaattcttaaaaatgaatcaatttggttctcaaatttttaagatcttgaggatcaaattgaaccatttaaaataatttggagaccaaattgattaatttttaaaaacttgagaaccaaattgaaccttttaaaaatttggggaccaaattgataattaaacctactttaaatggacaaagaaggcatttcccatagtttcaataagcaattggatagcaacaataaatgtcaggaaaaaactgttttttaattccagatggactggaacaagcttttaagaattaggcacgggcataaaacttacaggaggctggtgtatataagaactaagaaggtgaaggaaaaggaaagtgggcccgaaaatcaaggcctgtgggtatatatgagagaaggaaaaaatgtgacacgagggattggaaggagagagggggaataacagaataaacaggtggcattgagaatggaggagggaatgcaggaagcagagaatcaggcaagtagagagagaatgattatttaaaggaaggtgcaaccaaatagaaggaatgagagaatttccgaagggttatgttggggtttgttagtctgagcagaggaacttatcatttatcagtcactgggtgttaccatttcttttttatcctaattcctatttgccatattgtaaggagcttgctccattcattgtcatttgtttcctgtagtttcttgctttctgctaatatactgtaacagaagattactctgttggttgtaaggggatccttcaatatatatcagttcttttatttttttccaatctatatctagttccaatcaatgtatgattgagggggaaacgtttataagtaatggaattttttccctcaaaccacaaaccaatatacaacctaatcaggactctcacaatgttaactaatttggcttattacatcttcttagtctgtcctcatcttcttattataacaaaaggtagaataaacttccaaaatgttggttattggaataggactccaataacatctacatgttaagttcaagacagatacttattgggttctggaattagtgaattacacaatctaattatgcgtaataaacaccataaatctttatagagtttagaggagtaggcacttgaattagcaacaagtttcttatgatcagagtaaaaaaaaaaaacttaaggatggaaataatagtaattttgcttcacaattatcatttaatgttgtaccctttgtggcttccatgaccccctttgtcatgaagacgaagcaccccacaaggcaagttcatgtcatcatggaactgcaacaaaaaatacatgattaaataaagaaacagcgcacacctatcactgattagatacttaaaagaaaaggtacgatatggaataactcaccacaagcacctgattaagaggtagcttataataagcagccattggtcctgtctgcagtaaaacatatattgataataagcctgaggctttatatgtaagctaaagatcaacaaacaagtaaatgaaaccatttgcgtgctaccacaaacacagaaacctgccatggaatccatattagtataaaaccagtaaaagcagaaatgaaagatgaaccaatcagccatggtcatgatggccatctttcaatcctcttctccttggttttgtatgaaaaaggggaaggggattaatagcattcaataaggacctctatctgaccaaagaattattaatccacaggagatttgtaagaagctatgtttccctacttcccagcattttcttattcccttcattattctctaatctgaatgatactcctttccacaatgactataaccttactctatcatgtatgaaaagattttccaaaaaaaaaaacataagtcaattcacagagatgaaggaacacaaagtaaaatcccctataagaaaccacaaaaaactatggagaaaacacagaaaacttaaccatcacaactgccccaagactctcccaggaaattccatgcacaaaaacacctgcaacaaaagggataatctaatactaaaataaccccaaaacacactaaggcaactacaattcttcaaaatgaccaaaacgtatctagatgaaacaacttgtagaaactaaagcaaaatatctagatggttgagagaaaaaacaaaaggcagcacatcttaattccttaccgattcaccactgagattcatgtaagtttgaggctttgcaagaaaaacaggaacttcaccaacaaaacctgtaacaaaccaccaccttgcctaataaaattcatgaattacaagaaacatcaaaagagaaacagagaacagcagataaaccttttccagaaatggctttggaatggacagtgtccataggaatcccctgtgactcagcaaatgcatcaatcatctcaaagccaacctaattcagaccaaaaaaaaaaaaaacatattttcatatttcaccacaaaactgctaattcaaaactaactataccccctttacactacagaacactttctatgcaatttgatgttgataacaaaaacttgaaacaaactgcaaatagaagcagaagcagaagtaaaaggaaaagtacattgtgcctggttcctttgaacttgtcgccagggttgcccaaccccacaaaaagccaagggcgtggagcaacggtgcaaaagcagcgtctgcttaacctattaagcatgtcctctgctgcgaacgtaggagaataattcattatgaacgaagaagaaaattataagagttgaatatgcaatggtaattaaatacctatcttagctatcaccgttgtctctccgcatcttcacaatcactaatcgattcgtgcagctagcagctaggcagctactctcccgttctccgagaaccggaagcggttcaatcgcggtttcaacgtcggcacggtcaatgagtgatgaacctaagtgtgtctatatatatttgctgcttcgtaactagctggttcaaccagccacttctagatatttttaaatttaaacaaatccatccacaaacacactatttcattttattaaaataaattctttattttattaaataattgtttttttagaatacgtttaaacaaactcccctgaaacttagtatctgattttattcaaatgtttgttaaaataattgcttttattaaaataaattctttattttattagatattttatttttaattagtatctgattttaaaaggataaaatatgttttacttcttgaaacttcaacttttattaatttggtcctgaaatctaaaaaagaaacacagtgactttttttttccttgccatgaaaattttaggagggataaaaatttgtgttttctaaagtttggaaactaaggtcaaggtaattgccaatttttggttttcgattataaatagtttgttattaaaggggtattttggttttctcttagcatcacttacgaattacactattgggcacttgcaatatattcttttttctccataaaaaaaaaaaaaaagagattgaaaatttaagaaaacagagaaatgatcaacaaacttatgtaaagtatcaatgtaatgtaatactaatatatattcaacttccaaggagactaagggagagcaagtaaatattgatatagtacaatataattaaattcaaagaatacatatacaagttctatacgcatgaaaatgaatatacaaattaagttttatcgtaccaaaatagacatctccagaagattgagattcagagctaaagctcattctggtttagattggatcttctgctcctttttcactatataattatatttagaacttagaattcagtttataagtgactgattttttatttggagagagggcaaagcccaaaaaccaagagtcaaagacgctctgagtcccggagcacccgatccgcagggggaatgccgcgggactatgggagtcgaaccaaattctgcgaaaacccccgacaaaaagaaggaattagttcagtcagaagcacatggggcactgttcctctaaaacgaaggtggcgaaacattcatttcttccaaggtgcttaactaagaaaacggacttggacgttgattcggcacatcccgtatggattattgatattgaatttatacaaaaatttatagaaaaattacaacctgtggtagttgcattttttcctttctctatctcgtttttagcttcctttttccaatgctaattatagttcacaggatcaatgggtcaccgaagaaggtaagcaaaattccatgcatcaatcttgctcatgacctatagttaaacatacagtctatattagtcattacaaacaaaacatatatctacacaaaaatgatactttactaacatatagagcaaagggagaaataccactcattgagaaaaccaatatttttcagtacaaaatatgatctatatctatggatggcaatatgggctggcccgccaaaaatgggtcggactggcctacttttagaaagtgggctgaaaatcctagcccgacccattttaaggtggcttggcggactaataggccagcccgccagcccaccaaaaaaaatttttaaaaaattttttaaaagaaaaaagccaaaaaaaagcaaaaaagtgtaaaatgggctggcccgcctctagcccattttttgcgggtcgagttggcccgcctttggcccacctttttgtgggccgggttggctcgccccattttccaaaatgggctgaaattttcagtccaattcaccttttttggctggctaaacgggctggcccgtcgagcccaacccatattgtcatccctatctatatcatagaagaacaagccaccaagaaattgtaaccgtgtgaaataaagtccattgaattttcagtctaaaccaccaagaaatttgtctttgttaaaaaaagtaaataaagaattatgaggcgacctgcacagttttaccatcaaaatcaattttaaaattaacaaatatttaaaaaaaattaaaattaaaaaatgagtaattttaactaataaatatcaatcctgttaaaatcgtcctaaaaaatggtttattgctgcttatcgatttaaaaaaatttaaaaacgtattaagatgatatggagattaaaaaaaatatatcttgcctcagaatccacgggcaaatcttacacaaatgttaaagaaagttccaactccttaaaaactctaactccttcactttattagttgcttggctcgactcttttttaccctttgatactgaaaaacataatttaataagttgtgattagtaaatgaaaaatcccttcatcctttggtggttagaaaatgatttcagtcgtacccaagatggtttaattagatgcatgcctgcaagaatattaaccatgttatcgcttaatatgatagacatatgtgtagataaatagacatgtctgaaaataagtgtaatactattaaactacgcattgaccttaaacttgaagaacggcatttttcttgtatatgctcttagatctctaattattttcatacaattgcaaacaaaataccgagtgacaaaaatgaatgaaacacgtagtttccaaaaaaaaaaagttatatcaatcatacgtacatcatgaaattcaaaacaaaacaatatataacagacctttaaactgccagtatcatgcagtagcttttgatcaatatgcacagaagtcaacaatattgaagcaagtttttagggagttggctaatattcccgatcactcccatgcttacaaaataagtttcctgagggcataagagttgggaagaaggagaagaaatgagaatcaaagagaaggaatgtgcatgtcgatgaaaaccactcacgatagagaaaaaagaaagcaaggattaaaaaatggagtgaaacaagtaaagatgtggacgccaaacgagtgaaacaagtaagaagtcaacaattatttagttttaacatgtaaggggcttcttttgtttagaaaagagaaatggatagatgagaaatagaaaaaaaatatataaataaaataatgttatttatttattttaaaagaaataagtgaaaaataatgtttttgtataaaaaaaattgtttaaagaattattttttgtatatgtgcttatcaaaatttggagcagattgatgttagggttgactatcgtcaagttgaactccatgatttcttaggttggatttgtagatgccctttaccagaggaatgagaggggagtacaagggattttgacgctcaagtaagtattgagtgagctgagaatggataaaatgaaggtagaattggattatttatagtgtcggatggagccttaagcccttgattgttggggttgttataacaacataactctatagataattcatagccaattgataagtgattacctaacaacacaacaacttatagataattcatagtcatttgataagcggttacctaagagcataacagcttatagataattcataaaaaaaaaagataataacattaacattagaattcaaacttatatcaatagtttatcaactcaatcacctgactcctaagcaagtagtgtcggtgctcctgtactagggctgacgaagggcgttggcatgtatattttaatgtcatgcacttgtcacgtcaatttgtggacacggacaatacaaaagcccccaagctctaagtcaaacttgttggcgaaataggttgttcaatgtcaatggtggtaacctcgacaaatttaggggttgagggtttgttaagccccccagcttggacaaacagtgtccgggttaaaattgatagattgtctaaggtgagtgtgtttttcgtcccttcaggtagaatctggtgttcttatgagagaagctcctgtttttgacaattctaaccgttagaaagcgctttgaagataaacgcttcattggatcatgtgtatagttctcgacatgcgaattctctttggagtatgggctttagacttgagcaaaggatagttgttgactttgtttctccttttgatcaaaatcttattcgattagttggggtgcaaactcaatcaatgttgcaaaggtttttcttcaaaggagcctggctatattggaggaaaaggagcaaaggcacaagtaggccctgagtaggatttcttccttggaggctaaggtcaccaaatggagagtcaatgctcgaactgagtagcgagtggaacgactcatagtggccaatgctactgtcgcccttgctgaagccgttaggtctaactaccagttgtcatccagggtcaacgatgtctttgctaagctggtgagcataagactggatggtgacgaggtgttcgaatgtcataaagagttattggaaaagaatgacttgacgagcaaggtggagcgctccgtttaagagaaggagaaacttcacacgacagtagatgaatctgtcaaggtgattgctgatctctaagcctaactaaaagagtcgaagctcactgtatccagcctacaaactaggttgaaggagtctgagcttgaggcgacaaaggagaaataggcgaataaggagctagaggagaaacttctcatgttcgaaaaggaggttgtggagcagcacaaaaagggattcttcaaggccatcaggcaggccaggttcttcactgagggtcttgacctatgtctttttgacccgtttaaagatgtaaaggtctgtcaacttctcgacgaggaagagattgttgatggcgaggaagacgatgaggccaatgtttaggttgtgtttcccttaatgtttagcctttaatacttgtcgtagaataatgagagtggtcctttgcgctaggtgcgatttttcttacatggcatgtctgtatggaatagagaatgagatgacatctgatcatctcgggtttgatttcaatctggttgaaggtcttgtccaatcatcttgggttaggttcaacccgatgacgcttccttttcactttacaaagcttcttacccaaggccgtggggacttacttgagttacactaacaagtgtttaatctgaactttgactatgcctgttatggtttcaagggaataagtttaccaagagtgtgtcttgggtacatgtgaaacatgaaacttagtagcaaagaggctcattaagggtggaccttgagtttgtctagcctttgagattcgattagggatgtgttcgtcctgtgtgtggcaagattcaccaagggcggaccttgagtttgatgagcctttagagattcgattaaggacgcgttcgtccttggtgtgacaagacccaccaaggacgaaccttgattttgacaagccttgggagatttgactagggacgcgttcgtcctaggtttgacgagactcatcaagggtggaccttggggtttgacgagcgtttggagattcgaccaaggacacctgttgttgtcatccagggtattgttggtctcatgaggatgcgattcaccctgggtgcgctcattgaccgtgtgggaggagtgtttgtccttttgagggcatctcacacgagcctccaacttgtcatggtcgaccttcaattttatgagttcctcctcatggcgacgttccatctttgcgatgcaggcttgaagttgatggagagcatcattgtctgtcgttgtcgttggaggaggattggaattttctaggagtggctcttaccgaaggtcgaagcgtgtgctaaccatgaatgtgggtggttgcaggggaagttttactgcgaccccatgttgggcaacaaatgtacttaccaaaatctatagcaaattgacgttagagttgattttcgtcaaattgggctccatgatctcctatgtcgaatttgcatgtgtcctccaccagaggaacgagagtggagtacctgcgaaaaagatttcgacattcaagtaagtatgtgaatgagttgaaaataaatgaaaagtgaaggtagaacttgattatttatagtgtcaaacgggagcttaagacccttaattgtcgggattgttataacaacataacaactctatagatagttaattgtcacttgataagcaattacctaacaacacaatcacttatagataattcgtagccacttgataaactattacctaacaacataataacttgtagataactcgtaataatattatcattagaattcaaacatatatcaataacttataaacctaatcattcaactgctaaatgagtagtgtccgtattttttgtattaaggttgatgaaaatgactaacatatatatatatatatatattaatgtcatatcatttaacacgtcaatatatgaatccgaataaaatagtactttaaaataaaaataaaaatcatggattttttttcttgaaacggaaaagatgaaattttatgttacgggtcaatcacttgtaactttacttccttgtatcaaactttaccgcctttattttcatcttagcacttttttttttgttaaattttttttaaataactcaaattattctgaaatttcgtatgtatgcacgtagcttagtttgaaaagacagtgttaaaaaaatagaaaagaaagaccctacgacccgaaataaagggaaaagataaaagacgagggggaaaagtccttgtgacccaaagcctcaattattaaagacaacaattattgtgattaaccatctcttggaacaaattatgccgatgaaaaggttgcaagcagtagcatgtattggactgtaactctcgtgcttgtttgtatagattcgacttcgtgtttgttatttaacggtaatttctcttcaaacatgaattaaggaaaaaatatacgttgttaatattaaaaaattatttaccttgagtaatcatagtatttacaaaacaccgtctttttccagttttagatgcattactttttagactttgaagaggctggcggaagtggggtgagggtgagagtgggttccgacccctttcctttaaaaaaaaacagaattttattttatatgttacataaataaatacttttaagatataaattatattatcattagagttcataataagtaaataaatatttttaatatataaattagagtaaataatatatattaataatatacatgattttcacatagttaattaatcaaaaactgtaatttaaggtaattttgttaacttttatattattatcctaaaagtcaaccctaatgtaaatttttatttagatgatgtaaaaactttttgattaaattattctaactattcctaaagtttcaacaataacacaaactctctttgtttttttaacatttataataaccctcttagtctgatgttttttttcaaacaattaaggaaaattaaaggatacttgattgggaataatttttttttatatctaagtatcatgattattggaaagtcaattcttaaaaatcataattattttaatatgtaaaatatgtttgattagtctaaatatgttttctgatgtagaaaatatgcaaaaactttttttcactaaatttttctggattcccactctttccttgagaatgttttttgcgagttgagtaacattgatacctgaaaattataaatttttgaatttttttttattaattgcacattaaaggtgagaataatagtttcctaatttaagattactgaaaaagtaaaaaaaattgtctatcaaaatacatcgttagtgtaatgtataacaaaatatcaatctatatttttcaatcaattaagaatatagtgtaggaataaaaaacaaaaaaaaaatcgtataatttcataaaacctcgtgagtaagtactacagtttattaaaactttttatattgttagtgtcatatttttataaaataatcacttattcttttaaatttttatgcatttgtttcggctttataaaataattagaatcttaaaaataatataaattttgattaaatttaaaaatcgttgtattttttatttttataatccatatttattcccttatctagtaatgctttcttgtcacatatgattatatcttatctttgggaattaattaaggatatatgatacgataagattaatccctataaacctaagcttgatccgctgaaaagtcagattactcattttgatgttttggatagacaacttctaagttctaaccttaatttttcttattgaatttttttatatcacatttattgaaataaaatttaaaaattcctataaactcattcaataaggtttgttgccgttgctgttgtaataaattagtaaattaatttcaaaaaaatattaaattaattttaaaatttataaaaatataaattagttctatatatatattttaaaaatcttatttctcacattaaaatgcttatatcatttcatttaaaataatagtgtgaatacagggtaggaacaaacccaaacacaaaaaaaaaaaaaaaaacttttaaacacccgtttatagtaagaacatgattgaactagatgcaggttgagaatgtttttgtagatttggaattgtagacttgttcactatgttgtcacaggtactgactgggtcttatatagcatatccgatagaactagataagatatttgtatgctggatgattttattttttttgtcacatgctagatagttttactggtacgtatttttatatttctcaccattttattcttcaaaaaagaatttcgtacacaaaatttaaaataaaaagaaaaaacttaaaatctacattaatcttctaaatagttccattaattaattaactaaaaagaaacaatcatacacgcattttaaattgatccccaaagagtcccaaaaattttcacatacataaatttaatttaattaagccacaaggggggaaaaagaagtaaggaaagcgtaggctaatgatgaaccgtgacctaaaaaacaaaacacagctaataaaaatcatgtggttgccctaattagtcccactcgctgagcacggtaacctaacccttttcccacttatatattatgacaataaaccacaactcacaacacaacactccctcgctcgctccaacacccgcaacagtatatataaaacgacacacacaccccgagagagaagagtggcgacgcgagtctagtctctctaatcacataatcataaatcaaaaaccctaacccgcgcgtgatcactcgtcattgctctctcatcttcttcttctttatcgtggccgccatggattctgaggtgcagcaatcgcaggtcgccgccatcctcggcgccgatccctccccctttgagacgttgatctcgcacctcatgtcctcctccaacgagcaacgctcccacgcggaggcgctgtttaacctatgcaagcaaaccgatcccgataacctctccttgaagctggcacacctcctccactcctcgccgcaccaggaggcgcgtgccatgtccgccatcctcctccgtaaacagctcacgcgcgacgactcctacctctggccgcgcctctcccctcacacgcagtcttctctcaaatcgctccttctctcctcgattcaaacggaaaacatcaaatccatctccaagaagctctgcgacaccatctccgaactcgcctccggtattttacccgacaacgcctggccggagcttcttcctttcatgttccagtgtgtttcctctgattcccctaagcttcaggaatccgcgtttttaatcttcgcgcagttgtcgcagtacatcggcgattccctcactcctcacatcaagcacctccacgatattttcttgcagtgcctcacgaacgcttccgttaaccctgacgtccgaattgccgcgcttaacgccgttatcaatttcatccagtgtttgtccggttccgccgatcgcgaccggttccaggacctgctgcccgcaatgatgcggacgttgaccgaggcgcttaattccggccaggaggccaccgcccaggaggcgcttgagcttctcatcgagctcgccgggactgagccgcgttttctccggcgccagcttgtggatgtcgttggcgccatgttgcagattgccgaggctgaatcccttgaggaagggactcggcatttggcgattgagtttgtgattactctcgcggaggcgagggagcgtgcccccgggatgatgaggaagttgccgcagtttattagtaggttgtttgcgatactcatgaagatgcttcttgatattgaggatgatcctgcgtggcacagtgctgagactgaggatgaggatgctggtgaaaccagtaattatagcgtgggacaagagtgcttggataggctctctatatctttgggtggaaacaccattgttcctgttgcgtccgaacagttgcctgcttacttggctgctccagaatggcagaaacggcatgctgcacttattgcacttgctcagattgctgagggctgttcaaaggtattatattgatcggagatgtcaactattcttgtggatttttgcttttatacaagtaaatggcagttagaatatttgtgttagttatagttgatatgattgtgattggttgtttcttgttgggcaataacttgtgtgtaccacttgtgattttgactttctaccaacttttaattgctgcaggtcatgataaagaatttggagcaagtggtggctatggtcctgaactccttccctgaccaacacccccgtgtaagatgggcagctattaatgcaattgggcagctgtctactgatttgggtcctgatttgcaagttaaatatcatcaaggagtgttgccagcactagctggtgccatggatgattttcagaaccctcgtgtgcaggttagctgcccctttattgaagtgatattctttattcttgaacatgcattgaaagtcttgtgattcttttaatgaactttgcatctcattaaagatgccaattatttaaaatacaatgcaaacagtaactgcaatgttactttattatacaaatgtgaagcattgtgatatacttcaattttatgaagtgtgtttcatttattcttttattcttatatagtcattatgatttataattgaagtcatgctattttaattaaataagctatctggtgtaattattctcaaaatattgtctacacaggcacatgctgcttcagcagttctcaacttcagtgagaactgcacacctgatatcttaacgccatacttggatgggatagttagcaaactacttgtacttcttcaggtatatttattgagaattaatctcaagaataatgttatgatggtcattttgctaaattatcgtaattcttcaattaattttggatattctatacatttttcagaatggtaagcagatggtgcaagaaggtgccttaactgctttggcatcagttgctgattcttctcaggtattttgttaacttctttgttcaatcaacatttataatttattttcttttgatcactcatttaattattatggtctttcttaggaacacttccaaaaatattatgatgctgtaatgccatacctgaaggctatattggttaatgcaaccgacaaatctaaccgtatgcttcgtgctaagtccatggagtgtataagtttagttggaatggctgttgggaaggagaagtttagggctgatgcgaagcaggtaggtgtttcttgtttatttttttactttgccaaacaagaatgtattatgtatggttttgttttatatgttcaccttttataccactttatcatcatttggaaaaatagtcggtctagaacaggaaaataggaagttaactgcccctgcatctctgttaagcacttctttctctctctggttagctatgtcttatgattttaatattctgtgtgctggttcttcactaggttatggaagttcttatgtcccttcaagtatctcaaatggagacagatgatccaacaacaagttacatgctacaggtatgctttttatatattatttacaacatatgcataaactgccaattggtctatgttttagtctaacaactttaatttgttacaggcatgggctagactctgcaaatgtctgggacaagattttcttccttacatggaatttgtcatgcctccactgcttcaatctgcttcacttaagcctgatgtaaccattacatcagcagattcagacaatgagattgaggattctgatgatgaaaggtctcaactttagtcccttttctacgtaaaagtttaaacaattaccaaattatgaatgcataatgtatcgcttttatcacacatcgcttgtcattttggtcttgtatgttcactaatagtgactttaagccttaggagttaaggtgcatttattgctttacttatctttatattatgacatccactcgtgtaattgcgcacacacaaaaccctaacacattcttatttactaatagcgatttcattcttatggagaattagaagcacgcatcaaaacattttttttttaggcaggacagatataattaagttttatttatccattgcagtatggagactattactcttggagacaaacgaattggaatcaagactagtgttctagaggaaaaagctacagcatgtaacatgctttgttgctatgctgatgagctgaaggaaggattctttccatggattgatcaggttagacttaggccttcattgactccctttacacattaatgcttgtttaagtgtttctttacatatttttccttgttaataatttgtatgcaacgcaggttgctggaactttagttccactccttaaattttatttccatgaggaagttaggaaagcagctgtttcaggtatgaaaaattattgttgctttgcatccttttttggtcgatgatttttccttgcacagtaaatgtgctttatatcattactctatctgttttaatgtttattatttccaatattgctacagcaatgccggagctattacgatctgcgaaattagccatcgagaaggggcaatctcatggccgggatgtaacctatttgaaatttttgactgacagtatcatcccagctctggtggaagcattgcacaaggtaaattgatattcaagtttatccattcctagttgtgttgttatgaagtttctatttttggattttggaagtgaatattttttattttttgatttgaaattgtcttgaaaatattttaagttctgaatattcatataaaccaaagcaatcctttgtgagtgcagcatgttattttttgttagtttaggagacccggttctggcatgggtttgaggactaagattactctaggtgatattggtggtgaatgttgcctgacttgtcagtggcccttggtatttctttgctgagattttcccatttctgtttacttgcaggaacctgacacagagatttgtgcaagcatgttggattcattaaatgaatgcttacaggtttggatcatgagataacattgtcatatattttgtcttttttttttttttttttctggataaatttcttttctttattatatagagccatgagtgttgaatataccttggcatagttgatgttatatattataatttgaagtttgatgcttatcattattagaattcaatcaagagcctcactgactctgctattatttattcttctaactgatgtctatccctgctaggttttgtgatcaattggcaaataaaaactacattttacagtttaaatatttcccttttcatgattggcatgttgaggatttaaattattgtttagttgacttaattacgaaatttgtcttttgcacttagcaactgcctgcctcattaaaggtgacactaggtgcacattactttatactaatgtagatgtagattttgcagtattagagtgaggtatgccatgcaaaaaattggtgtgccttcctgtgaaggtgactgcatatgtttatttactttggcacagccttttatgatgtcactttatataatttctctaggaggccctagtaaggagagcttggtaagatgtcaattagtcctaccactggagctagagtgcgactgagaaatattataggcaaaactattaagatttagaggccaatggtttatatataattaacagaggatgcttggttgtggtttatattcttcaatttcacaatgtgtgcttttgtttattgtgcatgagtgtttagtagttgttcctgtgatgcttgggtaatgatcgacccttttcttgttttttgtgtgtctttttttatctttcccttgagtgcctatggtgcactataaatatgttttggatgtgttccaatcctttttttcttcctcttttagatctctgggatgcttttggatgaaagccaggtcagatccatcgtggatgagataaaacaggtgatcacagctagttcaagtagaaaacgagagagagcagagaggacccaagctgaagattttgatgatgaagagggggaactgattaaagaggaaaatgaacaagaggaggaagtttttgatcaagttagttgtttaatctaaaaataatttgaaacatcttaagtactggactactatctttgtatttttaagtttatgcagatcagtttcctggtcttccttctaatgtatgtatacattgtcccaggtgggtgagatattgggaactttgatcaaaaccttcaaagcctccttcttacccttctttgatgaactatcatcatatctgacacctatgtgggtatgttctttgagaaagctagcaactctattattaattagtttttctatttccatttattcattcagctggcctttaagcattatcttttgtattttgttttggtgtaattatgtctaaatttttctgttttctcagtttacctagtaaattttaaatatgatttcaaaatgtagaatctgtgcagtattgctaattttgaactcgtgccttttcaaaagtgtgaaagattactctgtgtttgcgtgcaacattaactatagatttagtcatttagagataaacttgcaagccacatacttgcatagatctatgtttgacttctaattctgatcttcacatctatcatcatcttaccagtttacactattttattacacttgtcatcttggagttcacattcattttcattctccaatgcacattagcttgcaagattttttttccgatgaaatgtatcattctaccatgtttaaactgtgagattgactttaaccatgttctgttctgcaatttgagtggtctatattatgttatgtcagcagatttcttacaagttgtgcctgctgattagttttaaactcaattttcaaagaactaatgtttggttgcacgttagtttagaccatagtacacacgttgattctcgtgtccaacatagaagttagtatttagagcttatggttttcacatatcagatgcactttttggctttctgatgtggtaccaaacacagcctaaaacatgtacatcattgttttgactcttggtttaatgttttggatatagggaagggacaagactccagaagagagaagaattgcaatttgtatttttgatgatgttgcagagcagtgtcgtgaagctgctattaagtaagcactctttgttttgctaggttaccatttttttgtgcagtgataattatgaaggcattttatcaacttcattcttttatataccaattgaacaggtattatgatacctatctcccattcctgttggaggcttgtaatgatgaaactcctgacgtcagacaggtaagcattaggtatcctctgttaacattttgaataccatttttattgcgtaagctgtttgattgttagagcgcaagccctgacacaacagtaaagttgtgtcttggtgaccgattggtcatgggtttgaatccggaaatgcatacaattaccctctcccatatctttgcttagtgaggagtctttgggcactggggtatgatagtttagttttaacttttaagctgtttgattgttgatgttggtattgcttcatatttctgcaggcagctgtgtatggtctcggtgtttgtgcagagtttggtggatctgtgttcaaacatcttgttggaggtactgcttgatccattaacaaactatgaaaaagctgtactatattgagtaacaagtcgttgttggcttactgcagaggctctttcgaggttaaatgctgtgatccagcatcctaatgctcttcattcagataatgtaatggcatatgacaatgctgtttccgctttgggaaaaatttgccaatttcatcgcgacagtattgattctgcccaggtcaattctgtttataacttgcttttgtgttttggttcttgattatgtttgtcattattattatcaattctttctgagtctgattgttgtttttaggttgagatgatagttaatatttttgtaatgttctgtcatgtttgcaggtagttcctgcatggctaaactgtttgccaataaaaggtgatttgattgaggccaaagttgtgcatgatcaactttgttcaatggctgagaggttaggggccctactcttcttttccaatcttctgatatgctcaagatgtcaggcatatctttttccactgtactaattgtctgttgatctgcaggtctgacagtgagctgttgggcccaaacaatcagtaccttccaaaaatagtttcagtgtttgctgaggttagtttttggttgcaactttgccaatttgtaatctgtgtgactgtctgcattgcctaaagttaagggttgtttgcttaatatttttgggttgtagggttgaatcagaaacactagtagactttttgtttttgatgaaagaatttaaatagaaagcaagctgtatacaagagtaaggagaataagattacttctctaaatagaatagaaaaaatacattaatgtatagaactccccaatggtggcttgttaacctaggcaatttcctacaatgaagtgtgtttttcacataggtcataatgtccaaggttcaattttttttattggaaatttgatcaatttggtaagttttggagaccagggaagtgtaaaaattgtttgtagcaccctgtcatatgatgaaagattaatatttgggaaatgtctagaaatttttggaattgagtaaaatgtcatttcataattgattgcaactgtaagttatttgcatgaaggaatatataccagaaggcaatgaattatttgtttgtaattgtagccattagattcttttattataaacttttgtaatattagttgatgtcatgcaatcatttaaatagttcatttgagtagttttggtgttgatattgacaatgtgcatgtatacatagttaattgatattttttcctcgtgcattagtcccgtgaataccttagtgtgtataaaatgagcagtcttttgttccatcaaacaaggacgcattcagtgaatgcttctttttggtaatatatataattatattggatttgtttgattttatttctccatttaatggaaaacattttttgtgacaggttttatgtgctggtaaagaccttgcgacagaacaaacagctggtcgtatggttaatttactcagacagctccagcaaactttaccaccctctacactcgcttctacttggtcatctttgcagccgcagcaacaacttgcattggaatctatcctgtcttcgtagttttcattgttttgctgcatatccatcatttcttcatagcatctggcttggcagttggtgtcttgcactttttgggaacaagctttttccagtttggtggtctctatatttgttacccattctttttgccataagatggtttccatcattcattcttgcatggtgttctgtatcagttttgagaatgcagagtcaattgtgattggaaagggagctttctctagaatgtgtatattatgaatgttaatagtgcgattgagtccaaaagaggttagggaattgtggcgtgggattttctcgttctattcctctattgttttttcttaccatattgcgtgagaatatagggttgtctgtggggcaattcttgcagttttggcctattgtattggttttatttccttatcagacagcatgaagttgtaccatatgaaattttaatgctatttattcattaagtttgcagacaattgtttcttcaaacaataatttggtattacttgagggcagggaaaagcatatgatttgtatgtagtatgggaatgcatctgggtcttgcaaaatttttgtattcgagttattaagatttggatcctcatgtaaaaaaatatgtgaagtgaaatgtgtgggtgtatgcacccttgatttcaaactaaattttgtgagttgcttaaattacattaaagggtggataggtttatttcactttaaagtatccaatcccgtgatggagggcattgattgatccaatcattggggggaaaagttcatgctttcatagtcggggacacgtacatcggtgttatagatgggcattaaaagtgaattgaatcgctgggaagtagcatgtctatattagtaagttgcaacagtgattgagattttagagcatatgtatatgcaacaatgactagaattgacgaaatgttaacggttgatttttttacgaggataattctcttataaaatgcacttttttgcactaatagcatagaaattaaacatccacaaaaaaaaaaaaaagcatagaaattaaactctttattgcaactcattgattagctaatgtacaattgtgataaggaaaaaatacatacaatagataaaagataatcgcttaatttcacttttggacctttaagtatcacaattatctaatttggttcttcaagtttcaattgaaatcttcaagttctgaaattatgcaattgtaataatccttcgataaacttttcgttaaatatttcagttgacaagagaaatgatcgaggataaaaccttctagcttatactctcacattaaaacatcccctaggctaggttttctgcgtcaactgccatatccatgtcaagtcatctgtcatggttaatgtaatgtcatgtcaacaaaatttaaatattattgaagaacttcgaatattataacattaataatttttttatttacaacataaatgtaaaataatttatttattttatcattacacattttaaaattttaataaaaatatttaaatttaacattagttgaaaagttaaacataaatatctcatacaaatacatttgcaaagttacttccaaaaggtttatcactgatgtacaaaataaaaaataaaacctaccaaaattaataataagttattccaaattccaaccaattacataaaaagtgttaggagagttttagagtgtcgctacattcctcaactttctatccaggccacactaatgcttggctgggccttaacgtaacaaacaccatgctcatgctggtaaccatgcatgagttggaataataattctccttgtgacctgaaggttagtggaatgaacaagggaggaagaagaacaagattcggagatggttgtgcgaagggttttgtcatattgtaatgtgtggatcgtcaaaagttacaggaagaaaaattgttgtgagggataacacgagattccaccactttcttaatggtgcttgttcttgcagtaatttttggtgaccaaggctatatagccatatgcgggtgaaaagttgacatattgatgttggaagaaaaaatttgaagtgagagggacctttttccatttctgataaattagaggcttgtaaagaactgttttgtgtcagcctagagataaactattagagaaggatgttgaaattttaaatcaactgcatacttgtttatttcacagggttgttcaatttattaatgaagagtgttaaaaatggatagggaagacaagtgatgccagctagcagactttttgtccttgggaaagcaaatgtttatatagatacatgatcaatgtagttgtgtagtaacattgagtattgttacatagagatgagaatcaaaggttgtaaatggggaatgtgagaaaccgtactgcattgattatggtaccatcctgaaactttatagtggcaatgacaaataaagcaatgcttatactgaagaaataagctaaaagcagcccttatatttttttgcttttaattttatcatgtctgcttttatcatttagaattcggtctttaaccaatacaattatgtcctgcgaattatgtaatcaactttatctagtaggacaatttttttcttcttattaatgttgtaattttaactggttattgaatatttaacaagtttggaaaacatttagcgggctgatagaatacctgtttttgaaagtgctcttcttacttattgttaccctaataattcttaaaataaggaaagaaaacaaagaataaagaatttttttcagaaaaaaacctttttactattttagatggagataagaaggaaataaaattgagaataaaaatatatcaccatgttaaatgacatttatatctaaccagaaacttctaaatttaagtctttaattgcaatgggcaactttgaaattgcagaggattaaattttatatgtttttattcgtatgtaaattagaatgcatttacatgcatctgcctttgactatgtttgagtaatcatttacatgcattctaatgcatttaaatgaaaaaaatttctccttgaataattgaaatgaacgaacgtttgagtcattagaacgtaaatctaaacatgcacttaaacattgtggtaggtggcatcattttattttaatttaacttgtaacattcaaagaatcaattcaattttatctatcttatgcatataccccttcttctcttccaaaaggaaagatacatcttcccctcctccaaaaggaactacaacattggcaatttgcttatcatcttgggataattttattaagtgcggataaagttttttttttttctctttcaaagaccagtgactaatttgcagtacacggttatttaaacaaaaaaataattagtgtgaaagtttgaatggtttttctagacaatttttctttaaagcttataactacctcggtcattctatatagtaattagcccatgtttgattaacattaattttgaaaagaaataaaaacaatcatttatttttaaaacacccttaaatgttgatgaaaataagtgattatttttttaaaaataaattgactaaatcatatctcatttatttatttataatccttaaacacttatcatcatcttgccgtttgttttgaaatagcttgtgtcgttgaaacttgatagcttgtctgggaaggaagtatgatacaaatggttataatttattttacaattttaacgatattttttttttaacttctttaagattagaaaagattacttttcttttgctcattacaaaatcatgactcaaactggtcatataagtttgaattttttttaaagagattacttttttcatagactacttttttaattctggaaaaaatatcaactgtttttagccttttctttataaattattttttattttatgaacacaaacgaatgtgagaataatacaaatatacaatcaagtgattcggattttctgggtcgatgctgggatcctgaagacatgattaggtcttattacgagttacgacacattaaatatttcagttctagaaaattaaaattatttagatgtgagttcatctgcatgcttcataatttgtccgaactgcttacaccgtctttgcattttcatttttatacggatgatgagctaactattcaactctcacttggaatatgtgaatttttcccacttgttctgtccaacaatgaaattcgaaacaatgaaggcatgcatcaccatttcaccaataatgcgaatattatattctaatgcacaactaaacttttatattttagaaaatggtataataatcgatgatttgcataaatggctagactttattgtagaattctcatttttttatggaacttctctaagatcgattaaaataaattatgacttccccccacaaaacaaatcatgactcaaactaaccagtaatcacgtaaagtttgcaaaaagaaaaagaaaacttttaatgatattttttataactttttttataaagtttaagaaaaaatctaaagctgtttgcttttgtattttggattttttccaaatttattatttgttaaaaaaatataagtaatgaaaagtaatttttaaaaaattcacacacaaacaatcaggctatagtttggtgatttcgaattctctggattcaggatgagctagcgagtggccatgcttaggcccttttctgatacatgatataattccgttcacacatgaaggaatatctaataataaataagtagttagtttgagtagttatagatttatttttaaaattagatttcagttttgaattttatgaatgaaaagtatgattagaaaaaaaaattattaaaaaacgaacaaatagatttttaacgaaaattaattattaataaaattagtaaatattttatattaatattatggtggaaaaaatattcaatagattccaattctttgctttcccattttcatttctttaagaggatgttgaactactaactatttaattctcactttgattattatatcttttcccatttattctcttcaacattgaaaacatgcatcagcaataatgcaaacattatattcacatgcacaaattaacacttggattttaggaaacggtacaaatgtatcactatatcatatatgaaacgaaatgaaagaataagaaaaatatcatatgaaatgaaacaattgtctcttttcctaaattaaaagatctaagcatccaccgactttattagtttccccctttacaattaatcaaaagaacttgcacattaactagttatgattggttttaaaattttgtttatatgacatacgtcatctgtctgttcattgtgacaattgacaataaattataaattataaatttcttactaatttatatacgttggtaacaacattttttgaattgttttttgttatctcaagcttaaagacgaacatactgtcacatgaagatgtgattaagtcagagtgattcttgtttatattttgctaatttttgaaacagcgaacgaatcaaatgcgactctatcttgttaaataataataatattataggagtatttgtcaagatattatattttaatctcaagaatcatattttaaaaaatattataactaagaatattatttttggatatattttaaaatgtttgattaaattttaatatttctaaacatatttttaaaaatgaaaataattataacaaaaaataaaagtagaagttataattgagttgaaaaatgatttttcacgttcccgtgaaaaatatgactttttcaaccctcattttagaaataaaagtacaataaaacatgataatactactttctaggaataaaaaatgcctagaaatatattttaacaaaattctcaacaaatatggaatattatattttcaagctcacattcctcaaaagaatcttttaatctgtaaaacatagtactaagttaaaagttgaaaaataaattagacatttaataaaataaagagtggaaatgaacgaaaataatacctggaaaataaaaggtcgatattttacattttcgagaagaaaaaagaatcttcctcttgaaatacgcacaagacaagacaaccctaaacataacataaactgaaaacaatagacattactattacaagtaaaacacaaaagcaaattaaaacaagagaagacgtgggtgtcgtgttacaatcaagatcaatacatgatcaacatgtcattctcagcggaagccatgattggtattccattccaagcataatccatgaagccacagtcattgaacagctgagtggtcgtttcctgtgcctcatcgaacatcataaagcagttgttgttggtggagttaatgaagctgatcatttcgttcagagagttcaatctgttgctcagttcccccatttgagccctcagaatcgcgttctcagcttccacgttgaggtacatctgcgtcgtgatgtctatgtttgtgttgatttgtgcgttctcctttttaagctgatccaattgggcactcagaccttccaggtgctgctgtttccttatcctcgatctacgtgccgattccctattggacaacattctcttcctcttcctctgttccatgatgtctctgtctccttcagaaccagagttttgaagagaactggaaccagatgaataggttccacttccaccaggagaagccatgcaatagtatgctatttgaacaataataactctaatttgctagctagatttaatgattgaatttgaaaaaagaacacgggtacgtactatgtttatactatgtacgaggttaatttatttagttcatgagaaaacgtagaaccagtggaggaaaacaacagagaaagattgcaccaagtgtgtcctgcgtcttagggaagagtttatggtgaagccagagaggaggatctcggagatcactggagaagacatttgtgttgtttctcaatcattcataactgcataacatgtaagtatgaacaaaaattatagcaatgcaatccaagagaaaaataatcaaactttgagaggaacaaggtaattgatgatatgtggaataagaaggttggtgtgaaggagataattatagagggaagaaaaaatctagaggttggaaaagggtgtcaaagactatgggcaggaagaagaacttttcaattctagaggcaacagagaagatgatgatgatgatgatgataagaaggaatatgcaaagagattggatagattttgaccaatttttaggaggaggataagatgagaaggggaagaggttttgaagggattcatggggcggaatttatagagaaaaaaatagcccattgtaataatagaatacaataaaataattggctagtgaggttttttggtctttggacttcatgctttttgctgtgtactgcaaaattaaaaaagtcaatagaaataagagaaggtgaaagagggaaaggacttggaaagggtcacacagtacgacgatgttcactgtttctgttcatgagcacgcgcagttttatttttatttacttatacttaacatatataatttgggttaaagatgttgatatataatcctagtatatatatgttgccatttaccaagtggaaacgcaatatgagggtgacctacttcgtagatgttggaccacccatttgaaatatttatttattagtggaattttaggtagttgcagttccttctggtttttctataataatcattttctggtttttattggtgctccttggcgtctgatattctactccttatattgccaatcacctattatttgtttgggtgagctacaattaaaagcttttgacctcttactgtaaactcaaattattattatacataatcaatttcaacgtgtgattattttctttccatgtattaaacatcttttaagtttgtttaaaatttatcattatttaaaatatataagttacttcaacaaataatactatgttttaactaccctgttattttaatgaaacatcaagagctttaaacatttttccatagagtattatgggagtactgtatatatatacacacataaaaatacgtatataataaccaagtgccgataaaaaaaattacgtatatgaccaagtcaaaaatattaacgacagaaataatccactcatatgcacaatttatttttacattcaattgatccgttgtctttaattatctaaatttaatacaaaaattaatgaaaatcacttaaaatggttttttttattcctcacaaatcataccaccgaaacagaatttagaactcacgaaaaaacaacaaataactctctctaatcatttcaacattctataaaacagaataattaagtaaacataaacgaatcaaataattaattcaaaagtaaggtgcataaaagataaaacttccacattgtttagagccattgatgatatagtgttatatatagatatataatttgaagatggtttaggtttaaattaatccgtcactgctattatatttatatttctatctaccaaaaatatggacatcttgaaatcacagcattcacatttttaattactaaaatattactatcatcattaagaaatcttttccacatggactaattttttccacagcgtttcatgtgaggttttggtgagaggagttgaactcgaatattaacaaacttaactatactccatattctgcagaaataattttaaatcaattattgtcacatgatggaccataactaacacaatactatactggtatttaatttaccgaaggtgatcgatgcatttttcaatagagccagcttttgaccaccagaatattttatttcatttacgatgtacattaagcacatggttccagttacgggttgtgttggaaaagaaagaaaaaggttcccgaccaaaatccagaagggtggccatgccagtccaagttgcccagctatttgtcctattttttttaaagaggaggtttacactaaactttacaaggaagaaaagagaaaaaggtacccgtccatagagtaaaaaaaaaatgaaataacaaaattttgaattaaaataaaatgtaagtgtgaatctcatttcgttttaatgtttatttattctctttttgctcgatttctctacaagtgaactgatccaaagaaaagaaaagaaatgagaatagtatatatattccttggtttattacttgatgtagttaagagaaagcaagatcatacaagattcaagtgagacccatttgtcagctaggttcctctctctctctctcttgcatcatccataagctagaactagaaggatccaaatttttcaatgtgaatgcagagttttaataacactatattctacaaataggtacaagtcatgtctgcagaacaacccttttgagttgggtctcactcattttcaactttatatgttgtttcgcggaagcttcaactaatcttacattcatgcattttttttaatcaataagcatattagatttctattttacatctaactaatatttttctcaccgaatcaatctataataggataaaagatattttaagttgtgatttcatttctaaaatgaatatcccattatttaattaagagacaaaaatatcgaaccagtcctaccattgattctggttacattcatgatgttacaactatgcatataaaccttaccgcttaagtcattgacatcaccagcgccagcaaatccgattttaatattttcaaagacttatgactcctgtttcaggaaaattactaatgctttcaacgtgggagaataacttataattgtatcctatgaaaaactagatggctgcttctgttcattttttctttgactcaataatcttcattgtgccaattgatataagatgttataattttatcctaggaaaaatcagatggctgcttcagttcatcttctctttgaccgataatctccattgcgtcgattatctattaaacttattatatagtccaatttagttagaaaaagactactcttatatatgacattttaatgattttattgcacaactattgcatcattaatactaccgataagatggaaatttctgagttgataataatctcaatccccttccaaaacaaaatcagatttttagctcaactgttaatgtttacttgacatgattaataaagaaactcgagttgtattggtaaggagctgttgaaaaagttcaattgtgttaacttaaaagtaaggtaatttcttgtgaccagtcaaaaaaataacttgttctgaattccctaaacatgttcttaaaatcttatgacaatttcgacgcctgtttctgtagttatgtatctttgtcggcttttatgtagttagaactaagaattacaaacctgattgactaggagaagtaatcgtcaaaaacaaaagatgaatgtgtttaagtatgcctagtctctctctctctcacacacactactctgataaaaaaagttcaactaaacagagccgcaaattgctttcactgatcacccttcagaaaatttcctgaatgtgtgcagttgctaaatggaagacatgttactttacgcacggtacccgaaattgattgttcatatatccaactatgaccaaaaaatagaagacaccaacaatttcagaagtgaaaaaaaaaaagtgaagtatgagatgaaaatgaaaacattatgtaaccacaaagtgttatagaaaacagactcgcagcctcactgtccaaaatcatgcatatccatggtcaatttgtcattctcaacaagaacgttgataaaccgaaagcatatatagagctttctttaacatattttaatgtatatatttaatttatttttattacaatactcaactattttcaataattataagtgtacgttattttctaaaatttggtcactttagaaaaacgaaatactgtatattactattacaagatctgatcatatcatgggtgctcctccaaatacaaagacgtacgagcaccaccctaaaaatgctcattatgttactttacgttgtcagcactccctgcgtctggcgggtgctattagttgcttttcttttcacgacgttttcatcggtaaagaacatcgcattacagtcacagtctcacatgataatacgagattctctggcatattcttgggccattgcccactcctccccctcactttctgagattggagtttggacgtacgggagagaaaatattgagatattaaattaaggatattgttaatctgtcgttaaaatattaggatattgattaaagaattaaaaaaatatttattataaagattatagaagtatgtacaaatttataattaatataattttatacatttaatcaaaaaattcttttaactttttaatcaatatcaaaaatatcgattagtatttgtcttaaattaattttttaatattttattgaaatgtataaaattttgttgtttatgatttttttataattttcatattaaatatttttattttaattttttgaccaatgtaataagacactgattagattagtaagaacaaaaaagttaaagctaattgttagactacccatttcctaagagaaactagacatttaattattcatgtagtataagctaaaatttgataactatatcttcaaatatttattattgataaactatcattttgcctgcttatctatcggatttgggaaatttttgttatgttttctaatatttagtgcttcaatttcacttaatttttctcattaagcgcagaaggataaatttcactcatagtcatgtatgagattcaaaataaaattatatattttaattgatttttttaaaagattttattcatcattataattgtatttcaaattaataccttgagtagatttctaccaatttttttttcatattttaagttatttcaaattatttatcatgttaaaattgcaacaaaatattttatttattatcattttcaaatattactaaatagaatggcataatataaatgaatttatattataattttgataattttgtattatgaagaaatgaggataatttttttattaaacaattttattctagtcaaataactaaaaaaaaacatgtttatattgtctttagtgtgtttgaataaatattcataaacagatgtttaaatcatcttaattttacagagagttaggcctcaatgaggtgtttatcattttgtttcttcttattatgcaatggtgcttaataggattttttctgaaaaatttatgtgagttggattttaaggaatgactcatcaagtcaagatgaatataatttcaataaatacttaccgatatacttatatattacttattaacaaaattttcacattgacaataaaatttagactcataattttataagatatgaatttgtttttcacaaactaaaccaatctttaacgtgccattaccaagcattcttcaaatacaagttgcttaaataagcagaggctcttatatcttatttaggcgcatcaatattaaaaaaaaaaagtaactaataaaaattaatatgataaaatatgaggatgtataattatttatgagacctatttaaaaaaaaaaaataaaagttaatgttttgctgagaaatgttgcttaagttgtaaaaagtaaaatttaatatgtgatgatggaacttacttaaaatatgtaaaaagtaatatcagtgtggcaaacatatcctttaaatgttgcaggaagtttatcagtgtggcaaacatatcctttaaatgttgcagagtaaacatatcccattgtgaactattttcttggaatccgacttatcattagagaaatgatatacacactcctactgcagagtaaacactcgacctcagatgcttatattttttttttctcttttctattttcaataaaatactaggtggtatgaaactattattgctattaatttttacatgatgacaagtaatttgagtgttattaattttttatcctaaattttctctttagagtatattcttgggttaatttttagtccaattacgtttctctcttctccatctttctctctgtaggtgaatgcgagcactaactgttcatggatcatttttctctttagtaccatcggcttatgttaagatttccacacacatattaacatttctagaggggggaaaagactgttaatttcattaccatgtaaatttatgctaatgctgaatatgaatttatattttggcataaaaggaaacaaaaggccaaaaaaaatatccttcctctgcagtctacattagcagttccatgttagtcaagtcagcaaccaaattaatggttaatatgattgcaacttgcaagaaaaaggtaaaatgcacttctgaggtctttacatgttttataatctccttactgtttctacttcaaaataccattacactcctcataggtcacataaagttcatcaaaaaaatatagttcattttgttttataactttccctttcaaaaaacgtgcctatgatacccggaatgatgaactttccatgacactctgatacattttccgatattgatgctgtaccggtaaagcacaagcacaagattttcaaacctgtggtaagtgccacaatgcaaatgccactgatactagtcccttagaaatgaagtaattacaatgtgagaactgtaaatcaactaaggaggcatttgaaagactatatttagggttatgaaagtgatttttgacctttctataattattttcaacatatttcaataaattccgtagttaattaagcttgtgaataagatctcgaatgaaaagaattacttcagtttattgcttgtctaagcacattataagaatctattgaaggttcttaagctttttgtctgaacctaaacacatttggttcactaatgatcccacgattgaaatccaggtagccgtgttatttaaggaaaacatcatctcataaccatggatatatttcaaagcacaaattatcttactcttttctgttaaattttaggaaacaacagatgaacaacactagttcaaatgggtttttagccgaaaaaccaaaaaacagtgtgcatggctatatacaagttacaagatgccattgtcctcgtggagacgtcaaattaaaaaggttctaaagtaatctcatgcaaagtacaaaattcggtagttaaatccttttaagattacagtttatctagggcaaatcagaactatcccttgagacaagcaacgggactagaaagccttggaagaattaataatctatgcattggtagaagcagcttcagggtgataatgtagcatctcattccacatcatttccctaatcatcggttctccccaatgttcatctatgtcaagactgatgggaacctgagcaggatggttgcaccttggatcatataggccagccatatacgggtgttggagagcttccaagacagtaattctcttggttggatcaaacacaagcattttttgcaacaaatctatggctaatggatctgcttgtgggtatagctgagagaagtgtctgcctctagtacagggcagtgatttgataaacctcctggcttttgcattgtcaataaactcaaggtgagattcatgctggcttccaagaacgcttataattagtttcagctggttgagacattcagttccagggaagattggctttctaccaagaatctcagcaaaaatgcaccctactgaccagacatcaatagaggttccataattgtcacagcataacaagagctccggtgcgcgataccagcgagtgacaacatactctgtcataaactggccatcaactccattagttcgtgcaagcccaaagtcacatatcttcaaatcgcaattggcattgatgagcagattcccgggcttcaagtcccggtgaagaatgtttgctgaatgaagatatttaagacctcgaaggagctaaagtaagagtatatggttagtatcattcacaagaatagttaaaatatgcaaagattagaagctcataaagaatccgttaactgctttctacttgtagattattatttgtcaattctgttcaacattctctgcaaaactcataaaaatgtagaaaagatgagggtgacaagaatagtccataatagggttctttttcataagaagcttcatcattcaatcaaacaatgctaaggtcatatcaatttcccaatttgggccaatgattttcgttgtctagtaccatgacaatatctagccggaagaagagaatacagaccccttccctagacttcacctgaaaaatcatggaactgaaacactaaagtctgactcaggaaacatagtaatacattcaaactagagaatgtaaagccacaactcaaattgtcccaactcctcaaaaacagcccgatgatatagtataagaatgcatgaaagaggatattcgatatttaattcacttttaagttgtacgttaataattgaaaatggggaattcactttgaagcatggcaatgccaattaaaacactgcaagagtgcattgcaactatagttcaacccccaacaaaatctccttcaaatgaatatttatacatttctgcaaattcaagaaaattcacaaccacaaaggtttagaaattagaaagaagagctaaaggaaaggaaaataccataacaaactggctagtacctgaaacaagaaatatttgcaatgatcattggaaagtggttgagaggacttaataatttgatgaagatctgtatccatgagttcgtagaccaagtagacatccttaaaacttgttctgtggattggcatcataacatctttcaaagcaatgacattctcatgccgaatatgtctaagcagcttcagctcccttaaagttctcaacgcatcaatagaattctcaaatatattaccaatcttcttaattgcaactttctcattggtctccctgttgatggaagagcacaccacgccatacgctcctcggcctataggcttgattggaacgtacttcgtatcaatctcaaacaatgtttgccatattgtgtaataatgcttcccctttggcttaattctgttggggggttcaactaaagttgccatttccctgcaaattaacagcaacacaatatattctcaataagtgaacacacacaggggactaataataaaactcacaacagtaaattcattattataggcatgaatcatgcatttactaactgtgacaagcaatcaacagtctgttaaagctggtatcaaacaaatatcagaaacacaatgcatatatacatccactggcattgttgcaggataaagggtgaatcattggatacttttttatgccatgttagagaaggttcgaatcaattcttagttgctatttctacatctgggttttgatcttttgatgtcaccttgtctctttttagaacctattctcaccaagcccatctttttggacatcttttttttcttaaaatataacaaagattcaattttatctttcctcttcacctgatctcagccttcaacccacacacaccccaataacaaagaaaccaaatcaaattgattccaaaagagtgagaaaagcgttcataccacaaaattcagctttcatcccagaatctccactttccttgcagctctgactccgaggcaccaaaagcgaatccaaagatgaagaatccctcctcaattgatggagcttcaagtaaacattctgtacaaaaaatcaattttgcacagctcaagcaataatctatagaatagagtggataatggattggatttcaagaagtggatttcatatcatttcaaatcttatcatataaacaataataaatgtccaatttaatcgagatcaggctagagaagaaaaggaggctatagccatagtcatcatattaataaatatatcataacgtatccatataataataataataataataataataataataacaataataataattacctaggcataaaggcatagaataaaataaaatatcaaaggagggtttagtttagggtatggttgggaaagaaagtgaaataagcacattaacatttttaacatacggcataccccatgactcacatgagtcatgacaacgaccccaacccacacggcattattattaataatgattgggtttgctttgcttttcccgtaaaagagagaatgtaaaatacgacaacgtaagtatgtactctatgggtgtttggcctttgggaactataaatctaaatctaaaatataaacgtgtcttgcctttttcttttccacgctaacgttaacattcacagattttggttcagccgtttcgtcttaaatttcattattattttcattcaggtgcaaacaaattggctagtttcctttcaactcaactaatctgtagaaaatctaacaaaattattcggtaccaaccctatggctacaagtacaaccaaaagccattcaatgttaactcgggcagggaaagtgcgttacctcctcgactcctcctattcttgccctacgtagtgctatttctatccatacatcactcctgtttttttatagtattttttttcctgaacttgtgattccaagtctaatattttgaagagtttgatttggtttggttttgaaatatttgatttgtgctattttgatttgctacgtagtctaattaaaaaaacgataaaatatacttttattcttttatcttataaaaatttatttgatttggttttccaactttcaaatttgaatttatgttgttcttgtgaaataatgatcatttttatttattttgggacacaattttgattataattatgactaactcaatacataataatttaactaaaaatagcaaaaaatgataataaaaaaattgtatgaaaaagtctcacaagcaactagaaaataaaattctaatatcatattcatttattttttattactcataaaaatcattgtaaatatacccttttgggtttgacattgctggagtagttgaatacttgagttacataattttgatctaagtgaatttaatatgaaaaattttacattttacatcactaaaagaaggactgaaaatcatgtttcaaaataaaaaaaaaaatccttattttgaaaggaaaacattaacttaaatttaactctggacccgatataaatactttatacatgtagcatgttaaaaaaattgtacatgagttttgtaaacaaagtagacattctattagacaactaatatgttataaatttgactttttattttgtaatgaaaatgaaaggaccaatatcataaaataaaaattataaaagtatcgaaattacaatttaatctaatttaaaagtgaaaaaataattgattgggtttgttcaaattgaaaaagataaattttataactaaaccaattttaattgatttggttcagattataatgattattttattgctcataatgaatttttaatttatattattttttatgattttgattcaagtgcttcacgaagctttttcaacttgaacttaaagtttctttttatttatttataacaaaagtcaattcaatgaattttattaatgatcaaatgaacaatacaaagggaaacataataaaaaaaaacttggaaaccagtataagatggagctacttttgccaaagcatatgtaactccattgccttatctccttacaacatcaagattcaagacagaaacttggatgtaaagacagtactctcctacattcagctataatgaggcccaaatcagaaatatcagaatgattcctattgactttatcaagaattcctttgcagtcagtttcaaaatcaacattttgcagtcccaaagaaatgaagaaattcatagccaacagcaacccgaaagcttcaccatccataactggcatacacggggttatacattcggtcctggaaacactttttattgtggcaaattagtaatgagcactaggcgatatatatgcaaatggttgtatccaagaaattatgttggtgtcgaacaattggtaaatatgttgtatgttgtgattagtgaatccctccctaacaaatattagcctataaaaacaaaaattttctttaaaagtgccaaataaaaacgatagtcatattccttcagaagaaaaacgatagtagtataagttaagataatcttacaggagagagagaaaacttaaccagtatcctttaagaaataaaaataatagaaaaaattgacatttaattttactgttgtaatttttaaaaataaataaaattattttctagatagctatttgcctatttctccgtttctttatctctagtttaaaattctagcatatacattaagaaaacgatcttttcatttgtattaaaattatttgtaactttttaatattctttatatctcttttttattattttgaaatttcatatattcttcttattatttgtaaaaatataattaaaataacaaaaacaataataacaaatttcatcttaatgtattaaaataatgtataaatataaacaaatttttcctttaaaagagacataaaaaatattgtagaactgtataatattttaagactgagggaataagtgcatgtttgatatcaagttgaagaattgattgagttcagaattaattttgaaaatgttttcatatgtttggtattagagaaaaaattaaaattgattttggatctaaaattaaatatggattaaaacaattttaagtaatttttaagttggatccaaaattttgtatttttatttttaacttgattttataataaagatatttaaacataaatcatatcactctaaaattaattttaactaaaataaattttatcaatactcataaaaaaaagaagagtaaaaaaaaaactcatattcaatgatactactatatcgtatacagttatcattaataacgaagtccacactttggatcgattggggcacaatccaagtttggttagtatccatgcttgaggagtaatgacaaatgaaagtaaaagatgaagaataagcaatggtaatagcgtctgcatttgggatcaaccttggctaaaggcaagtgatagttctatccttcatcatcacctccacttggtcccttaagtaatctcaatgtaagttgtctcattgaacatcaatccaatgattggcgtatggatctttttcataattttttctgccatcgtgatattcatgaaattcaaaaaatacatttgctgaatgtgacgcatcaagatcaacttctttggaaattttaaaaatggtaattactcagttcggacagcttatcttcgcattatgaaatccatcatccaaactgaccatctcaaggaagctggtgattggatgcaaatctagaaccttaaatttcctcccaaaataaagcattttctttggaggatcttacgaggttgcttgccaacaagaatcagattgcaaacgagaggattctcatgcacccatgcttgtcctttttgtggaacaggttttgagaatgaatggcacttgttctttggatgtgatcatgcaatttctatttggcaattatcaggattttggcctaaaagtcagcagaaggttcaggtggcggaaggtattaaggatctctctctctcacacgaggatagggagcagctagccatcattctttggactatttggactcgaagaaaccagcaactttggaagaaacactaattcatccacaaatatctatctccccctcttctcagttcttacacgaatggaagtttgctagatgaaacatgtttcacagacctactgcagtccaaaatcacgaatatcacagctggtctcctccccaaccaggctcgttaaaattaaatatagatgctgctatctttcgaaacactacacttcaaatttggtgcagggatgtgtatatgagattattatgttatattttttttggtgatacataagcttcactattatttaattcttatttttataattcttcaaatctcaatttattaattttttcacattatcttgttatttttcactttttattggagaaccaagtccaacagaagtagaagcatatgacattgttacaaggtcttacatgggttcagcagcttggataccagaacattagcattgagcttgattgtaaagctgttgtcgatgatttaatgtgctgcaatggcaacaaaacatatgagataattttggttaagtgtagagaggtcctatcattggtaatttttataaggaagctaagataataatattgttcataagttagatagagtatcattgtctttttgttagcattcaatattttttatcatatatattcttagttgtattcattgatgttattttgaatgaaatgaagcctacaaatcctgcacatgcgtacaagtatcatgccacgtggatgccaacgaagaattatgcgactatgggatttacgatcttgtattttaatacatacagttctatcatgactcatatgtggctgaaacttaataatggttcccaacttcggattttcatatggtggtgtaagagcatcttttatctttatctttaactttagtgttactattgaataaagattttaagtttaagatctgatttttactatatctttcaagataaagggatctctaacataaaaaatgaattattatagaagaactcttaaaatttgtatattctttaaaaaagaataatttttttttctctttcttactctttgaaatctcaaaatgagatttatcattaaagaaataaattagaaaaatcttgagagatattcaatcctatgtggtactatagtatccaccaaaaaatgatctaacattttaatttaagatttaccactaaaaatactctaaaaaaagtagataattctaatatttatttgtcagttaaattaaaaaaagataagttacattttaatttcttataatttggcttaaaatactttattttctgttacctggactatagaatttgatattttatcatctttatgttttgttttaatttattatcgcatcgataatttagtacattttatcgatttttcttaagattaatatattttactctcccgcgattttcagttcaaaaaatagtatatatggaaaaagaaaaaaagttgagtcactaataatggagatttatataaaagatatttgctttaaattgttgttttaacttttaacttgttcatcaaacagagttgggatttgaatcctctcctgcgtgtctctgtccaacttctctccagttggttagaccattggattgatctcatgacagaagttaatgaatgagaaatggtggcccttggattaatctaacggatgagaaattataagtaaaataaagaatgaaaagtaaaatgagaatgagtggaggataatggtattagagaaatttatgtcgggaaatgcaaatccaaatggcaaagatcatgaaatcaaaagcatatgccatagttttgcaaaatcttttcccgaaagttctgctcatgacacttttttgctttttatttatttttcctttgtaattttcatatcttatacaggaataacctgtgtggctgtagtttttaacctctcttgcataattacgaacagtgacattgattgtacaatcatgaaataatgtaagacttctcacattagtgtgggataatgcacttcacgttattgttcgtgttcacgagcctcgatgcttttgccttctgcaatctttcattctattttatttataatttcttatccattggattgatccaagggtcaccatttcccaatcattaactataaatttcagccatgagatcaacccaatggtctacaaaacagatagagagaagctggagacaggaacactggggagagattcaaaattcaacggattaggttaagctaaaccttagttgtaatatctttaccattaaacaactaacaaattataatgaaggtatctttagagtgatggtaagctttcacttttttattttcaaaaaataattttaaaataaaacatgcccaataaaatggagatgaattgctttttctttaaaaaaaaaaaaactcaatttaaagaaccaaaacaattcagtcttttcattctaagttataaacacaaataatcaattctcttttttctttattattttaaagaaaatttcaaatataaccattgttgtaaaacttagtccgacccagccgatcggatcgaaacccgatgatttatcctgatcggtttcattattggatccattatatagttgattcgatcaaatttgtccggttaggttatccgatttcgattggaccgatccaatccgactggttttacaatttttataaaaaaaatggattttttattataaaaaatttggattttttttttaaatatattttgaattttggagtattaataaacttttcttatcaaataatactaagcatatacttatatatagatacatatataatttgaaaattttaatatatatcgaatcaaaataaataccaatcaattaaatcactaactcattatctcaaccaaattaatgacatgagaaaatttcacaactgtgcatataactattgcgattcccgccgtagcaccatccatttatgattaaagccaaaacttgctctccctcaaaaagtaaatatatttcaacaattttcttatgcatgatttttattgtttttaacattgattaaggtattgtcaaactattataacagtattcattcatagaagcatgggcggatgcaggttaacaattggggggggggggcagtgccccccttaaattctcaagaatagaaattttttttataataataaaataaagtaaaataaaaaatagtttaaacgtttgtataagataaaaaattgaaaaacatagaaaaaaaataataaaaaaaatgaaaaataagaaaggagtgagtatggatatgtatgtttgtaacttttatgaatgcagtggctacactcttgttacttttgagcacccatcacatgctaattttgttaattttttctcttttaaattatacatttttcacacttttattataataatttattccttttaattttcttcacaaaaaaaaaaaaaattcggagacgccacctccgaatcccgccactattacctctcttatttattttttttttctagatccacccctaccctatatagaagcatatgacccaaaacatcacaaacacaaattcacctcttttgaagcaagattcaactacccattcatgcatgcctcaaaacatcatgtagggaatttcccatcaacaacattaccaacccagcaagaagtatacattatttcccatcaacaacattaccaacccagcaagaagtatacattatttagtccttgccactgcaacataagaaacagagtccaaaaaaaaaaaaaaaaataggtgtataggaataaatttacagcaccgtcaaagaatttaagtccttaaggtggggattcccaaaatcttaacatccatactaacaaatcatgttctttgataatagccaaacgcttctttaacctatgtttatttaaaggacgtaaatacaaattatagaaataagtagaagttatctaaaatctttaaaaacggttaatctagcaagttttccattaatattatatgctattctacctatttatgatagactgaatatattttaattacttattataattttctaacattaatttaatttttttaacaaactaaagcaataggtgtagcaaaaaaactaaagctatatggatcaagggattttagaatattattttaatcatatagattcacaaatctatgataaatcgctttacgttattcttatttatacgttgtagatgtttttataattttactttttatttgaataaaaaaatatttaatgtgtgtttaaattaaattgacccctattaagtggatctaactcagttaattaaataaggtgtctaaataataactgataataaaaattaaattaaccccttaagtgaaatatatttatgacgcaacattaagactatatagctttatttttgggatcattaactcttttataaataaatcgcaacatcattcaatccattagtgtcaattgtattttttatttaaaaaaatgtgtactttttaaagataaattattttttcattttctaattttctataagtaaacaataatcaatactcataagccactgactactaaaatgaaaaaaaatgttacaaaaatattattgtaccaaaaatcacaaaaaaatgtttaaaatcattataatttctttacattttttaattaattttagaataaattacactaatcactattaatatttcttaaaattacacaaactttcacgatttttttacatttacattagcatgccttacatgagagtacggtagtgtatattttataaaaattaccgaggattgtagtaaaaaataattaaaaaggataagtatagaaataaataaaagtatgaaaagtttgtgtgatttctcaaaatttcaaggatagttagtgtacattattcttggacttaaaatgttaactatatttactttttttatttaatcctcttataaaatgttaactatattttttttatgaatccaagatatcctacatcaataaccaataagtactttcatagttgataaaatgttaactaaatatattcttatatattttaaatatattcttatatatgtacaaaattgatatctttgaacaaataatttttttcatattacgaacttgggatataactcataactacatacttaaagaatagaattattatgtcacactatgttgataaataaattttaatcacgcttgtgaaacaaatagtattaaaaaacttttaaaagcaaatatttttaaaaaatagtattattttaaaacaaaaactgcaacataaatggcctaaaaatatactctttgaccattaggcttgaaatggttgatgcgttttgttttattagtaaggttggtgttggaattgaagaaataaagatattttttagatgcaggaaggaggagtgaatggtaaattggtgatggaggaaactgaaaacgaagcaagtagaaccactgtgctgtgctgttattttgtttcgttgtctgctaataattgtaagcatcagtaatgggcagtggctggcagcacatggccgccctgctccaccaatccaacttcgcgacataaggacaatttcgtaatatttcgtttattaaaatacattttttctcatacggaatgtcaagtattttcatatttgaaagtcttcaagatgtaaagatcatagcattttgccagataatctattttgattctctattaatcaatattttgaactattatcatagttaaaatgaatagcttaaagtctagacggaatgtaataatctttctaccactattccataaagttattagatttttcttatacagaacactcgtgttaataaaatgacttggtgaggatgacagtaatatatataagaatatatttaaaatatttattttattcatcaaattaaataatgtttttaaaataattcattgttattctagttttgaaatataacatttaaattctatttttcctttagaattaatttttatatataaaaaatctaaatatttgatagtttaattttttaaaattacataactacttttttttttgcaacttatgtaatcctagtagatagaagtgtctacatcctatcttaaatcttaagaatcccatttttttttatcggtaataacttatacattctacttaatcaatttatctaattattttattcaataccattttttaaacacatctaaatgatcttattatcacatgtatcatttatttttattttatataatctatccaactcttctctccaactcgacaattttatattttttactgagttccacaagtgactttacattcctacatcagcaacattttttttattatgttgtaattattttaattatattataataaaattgttataaaaaatagtttgactaacatcactacattacgtaattctatgtttttctataattaagtaacacaatattttacaatctcattgttttctttctatcatctaggatggatccttgaagatgatctctaacccaaaatctcccctcgtttttaactctaattgcttcaacttgatttgttcatctttgacatttgttaatttcgtcattcattacttgatgggatgtccaatattagaagagacgagtatactttagaagataaaaactttcttctctaactagctctataaataatgtatctgatcgtttaggtctcttttttcaataataatcaatcataacttctacttgaatcgttgatctacatcatgagaataaatcttatatgcatatctcctgatgtcatcttagagctaccatttttctttctttcgcaagcttgttggtatcactttgcaaaaaaattaactatgctattcaacctttatcattgatattttagtcgtgtaactgctgccatcacttgcaaataggcctgatacttattgtatttctctttaattcttaccccaaaagaacatccctttaattctcttcacccctacaactgcatcattgaaaacatgtaaccatgtttggatgagaattttatgatcccttggggtgaaccttgctctttgtttttttagttggttgttcttcatcaagcttaatattatccaacttgaattagtagaaaaacggtggagcttgagattctcatatgctatttcatgtctctttttactagaccgccaaccattagtactattgaagtcccatgattcatgttgagcttagttcgtggtgattgaaacataataaattgttctaaaaaatagagttttttttttacagcacgaataattagagtttagaaatttggaaattgttcatactaagatattttgtgaatttggtaaacgtgggagattttattaaattttagattagtaagagattaacaattgtatataaaattttaaaagaaaataaaattagattagtttggatttattgggtgaaaatgactaaaaagatagttacggatttgagagaaagtgagtaaaacttttctctttgtaaaaaaaaagaaaaaagaagagaatactagaaaataattttggtttttaaataattttaaacggtttaatttgattttcaaaattttaaaaatgaataattttgatttctgaatttttaaaagatttaatttaatcttaaaaattttaaaataaattaacttggtccaaaattattttaaaataattcaattttttctcacattcttaaaaaaatttaaaacttgaggaataaattgaaattttaaaaaattttgaaatcaaattaatttatttttaaaaacttgagaatgaaattaaattctttaaaattttgaaaatcaaattaaatcatttaaaataatgtgaggagtaaattaatattaagtttttactttagtaaaactattttaaaaggatagaaaaaaaaaaaaaagtaattgtggatgtatttgtgagatgcggaatggatggagtggggtcggataggctggggccaaacggggcggattgtaaagatttatgaaattcccctttgaaccctgaggaggatgttaagacaataagacttaagagtgagtgtagtaagtagctgtaaagatagagagagacgcttcgcaaatctcaatcgaatctcagcctttgaagaaagatgagagaaatcatcagcattcacataggtcaggccgggatccaggtcggaaactcctgctgggaactctactgcctcgaacatggcatccagcccgatggcatgatgccttctgactcctccttcggtgtagcccacgacgccttcaacaccttcttcagcgaaaccggatccggcaagcacgtcccccgtgccgtcttcgttgacctcgaacccaccgtcatcgacgaagtccgctgcggcacctaccgccaactcttccaccccgaacaactcatctccggcaaggaagacgccgccaacaacttcgcccgcggccactacaccggttcgttcctccttccctccctcactctatttcaatttatctgacctaattttcactttgtctgacctattttttattttccccattttcagttggcaaagagatcgtagatctgtgcttggatcgcgtccgcaagctcgccgacaactgcaccggcctacaaggcttcctcgtcttcaacgccgtcggcggtggcaccggttccggtctcggatctctcttactcgagcgtctctccgtcgattatggcaaaaaatccaaattagggttcaccatttacccttccccacaggtttcaaccgcagtcgttgaaccctacaacagcgtcctctccacccactccctcctggaacacaccgacgtggcggtcctcttggacaacgaagccatctacgacatctgcaggagatccctcgacatcgagagaccaacctacaccaacctcaacaggctcatttcccagatcatttcgtccctcaccacttccttgaggttcgatggtgccatcaatgtggacatcactgagttccagaccaaccttgtgccctacccgaggatccacttcatgctttcgtcctatgctccggttatctctgccgccaaggcctaccacgagcagttgtcggtgccggagatcaccaatgccgtgttcgagcccgctagcatgatggccaagtgtgatccaaggcacggcaagtacatggcttgctgcttgatgtaccgtggtgatgttgtccctaaggatgtcaatgctgctgttgccaccatcaagactaagaggactgttcagtttgttgattggtataattttctctcattctcttgtccattgtcatgtttactcacatttactaatattcatcactagatttgtgtttgtaaactggtttgagttgtggaggctataactgtcggattatcagtgaacatgaacaaaccccatctgtgatctggaacctggaacctggagccaaacatacaagttcatgtttggtttctcacattgagagatctaatatcatattgaaatgcgagttaacatgattttagggaaatgttcacttgtttggtctctcattgatgaattgattctgggtgtagaattgattttaacttttaggttgaagcaaaccttaggtagtgtttgcattggatcagaaagtttataatgagatttgccattaacttacattttagaataagaacacttaaacatgattcatttcacttaaggatcaattctaattataaaatcaatttttcaatttttgatctaacattgtgaatttgttgttgttgattgtgataggtgtccaactggattcaagtgtggtatcaactaccagccaccttctgttgttcctggtggtgaccttgctaaggttcagcgtgctgtatgcatgatcagcaacaacaccgcggttgctgaggtgttctctcgcattgaccacaagtttgatctgatgtatgccaagagggcttttgttcactggtatgtcggtgagggtatggaagaaggggagttctctgaggctcgtgaggatcttgctgctcttgagaaggactatgaggaggttggagctgaaggagcggaagatgatgaggaaggagaggactattgataattgaaggcttttttttgttatcagtttccgagtaaaaagggtatatgcttcgttacattaccctgaaccattattgttcgttcttttttgtttttactcctgtgtgatatagttctccattattcaaactgtgaagtgatcaacattatgcttctatttggtggtttaggacctgttgtttgcgatcctcagtcatgtattcagaattgtccatgtcaaaagttgatttcttatgtttatgtcgcaaattttaccagatttccgttttgatgatctctttttgaaccgtgaaaaacgtaccccttgtatgttttttgcaattcgcttcattctgggaatcgatgtgattaatttgtgatttttgtacgcttgtttaagtttattattatcagtgttgggtgaagtcaaggcgcgtaaaaactgttgcaagcaaggctatctggaaaaaagacattactaaaaactaggaagtatgaatacggatgttccagataacaatttccgagtatggaattgagggaatcagaaccttcagaatgaaacttgaaacgcctgaattgggaagtacgaagctgcgtttggtttggcctaaatatggaaaaatgaattggaaaataaactctacatgagttggaaaataaatggtaataagatatctgagcttagtaaaacttgtagtaaacactgttgggaagctctgctcaataataattcggttagtgtggtttgtttaagcatccctcagttgtttttcaatactgtaaattcacaaaaccatgtgactttggcaggcgttacttcgattgaaaatttgtacctatattacaagtttggttgagataattctaaatataaattccttttttcaaaattcaattttaattaagattaatttaattaaaacaaatcaagatcatccaaaatcaaatttgtaaagtcactcaaacacacgcctttcaaaataatatgcgaatggggctaataggatgaagttgtcggtagcagacttaaaaaagttccagttggtgttagaaaaaaataaaaacggttcagttggtatcattagtgttaatgtaatataaccggtcaagctcaggcgcacacaaagccccattctacggcttaaaaattcaagagagaattactaaattcaagagagacttactgcatatctattcttgagacattggccaaagtgtcacaaatcaaaaaaaaaattgtcaaaatgccacatttcagaaacaatttgtcaagctgccacgccacgtaattcgttggccacatcagcgaattacatgggctgacgtggcgtcgcgtgagtggagggcataattcgctggaaggggtgccaaattaggtatgccacgtagcaaatttttcgtaattgcgtataagttttggaaggttataacttttgactgggacgtccgattcacgcgaaattggtggccacgcgctcgaaattgagaggagaaggcctaagtaagtcccctttggggacttgtccaaaaagttttcccaaaagaggcctctaagtgtctcaaaattgcgattttgtatttggacatccaaaaaattcatttttgtctactttttttaattatttaatttaatgttattttttattttttcaattacttctctaaatttcgagcattttgacatatcatacaccttcatcggacattcctagccaaaaatatcactgtttaattgataatgcatataaacttcatataacctttgaacagtgatattttttgatagaaatgtccgatgaaagtgtatgatatatcaaaaagctcgaaattcagagaagtaattgaaaaaaataaaaaataacattaaattaaataattaaataattaaaaaatcagacaaaaatgaatttttttggtgtccaaatactaaattgcaattttgagacacttagaggcctcttttgggaaaaaattttgggcaagtccctcagggggacttgcttaagccttctcctctcaatttcgagcgcgtggccaccaatttcgcgtgaatcggacgtcccagtcaaaagttatgaccttccgaagcttctacacaattacgaaaaatttgccacatggcatacctaatttggcaccccttccagcgaattatgtccttcactcacgcgacgccacgtcagcccacgtaattcgctgatgtggccaacgaattacgtggcatggcagtttgacaatttatttttgaagtatgacattttgacaatttttttttttatttgtgacactttgaccaatgtctctctattctttaagtcaataactatttggaacggctatttgattcttcaacataattattgtggcatgatcaattattccaaaaattttaagcggtgggaccattctcaatcatgcttagcagttagcaagtcgtgggtcctatccccgagggaagtggggacgtgtttaactccaccaaagactcattttcaaacttcttacgatctattccagacacctcatcaacaacgtgggtgttgatcacaacataagtggttggatttgacttagtagagacaggaggttaactccacaaaccctagtcaatccctcgggttaaacaaagcatttatttattttatcgtagtcatttgtttattttaaggacattcatatttaaacattattttcttttacagtattttaatacttgtattatacataacccactaggaccagtctaatattataggacagggttgaggtagcttttacaaaagtcttaaacaaaaatacttgtattatacatgacttgatcacaaaataatatggacccataagtgaacctagctaggagatgcacttacatgtgtgtgcagaaattattttaaaggtgatatgtaacacaaaaaagtaaaatacatcttaatatccgttttcatctaattatccaaccataaggagtgggattgaatatatcgtaagcactgagtacatttgtagaagaatgaagactgatatatagtgcgtacacatttgacttcgcacattagtcttccttattatactgagatggggtgtgactgtaagtgatcacgagcttgcaaaatatccaatgggttaactttgaggagttaaaaaggattgtttcactctgggcaaagtaccatggtaccaaaaatcttgttactgattcctataagcacttgttgaagcagaggtgggtttagaaattcaatggtcttgactcttgatttatcctctcagggaaaatgacatggaaacaaggcaatattatagaaactatgttttaagaagagataggaagattaagatagatatcaagtgaagcagaaaaagtgggagagaggataattgacatcatattcatacgcatcctcctcattgcactcattggtggcatatcctgacaattgcctttctacatttaaaccaaaatcatcttttgatattggcaattcgttaatcctttgttgggctaatggccaagaataatcaaactgcgatgtatttggtgtgatacccattgaacagttgatcatattcatatctagtccatacgggttatcacagacttggtggttctgaaccaaaaacaaagacttaccttcactactacaagcagagtagttttccataaccatgatcttattgatggcactaacatttggactagctgaagtagcagcaccttggaaagtggaacttatcatagaggattggctttgaatttgactttgactttgatttgacatggctttacgatcaagcaggtttctgagtttgagagatatcggagaatttgtagcaatgccacacccttgagtagaaaaattggtgcgagtgtttgaacctcgaaggaggcatgcagcttcatcataagctcgagcagcttcctcagcagtttgataagttccaagccaaagcctaatcttctttgatgtgtctttgatctctgctgcccatttccctgaagccctttgtctcactcctacaaacttcggcttattcttgatctcgagtttctcacagaatctaccctccttggccctttggttttgatactccatactgtatgagagcaatcaagttagagataacataaacatatatatatatatatatatatatatatatatatatatatatataggttcatgtgagaggcttaggaaaatatcataggttaaatttaattttgtggcttagagtagtggagagctcgtattttgtttcttgtatcctttttatctaaaatcttggaagtcttggctaatgcctaaactaatgtggggtttgtatttggcttgtagctgtagtggttgtcctcacctcatgccttagttctttggattggtcaaccaaattgaaacaaagtttaattcgtgatgaccacttacataaaatgttgttttcaggcatataaattttaatgtgctctcgcagttgatcatttaataatcctatagatttttgtacaaggcacccgcgcagtgcatgtgggcttattttatagaaaaataaaaagaagataactgtacgttttttccaccttgaaatcacaccacttatatttcatagtcgtagaatgtgatatatgacactatctcagagcctgccacgaggttttaaattttgttttgtctcaaaatctgtattcgtgtttacaattctaaaaaagcattatccttaattatgtattttcttcaagcacaatatatttcgtgataaaatccgaatcactaatgaactgtaacgagcatttgaagtggagcctccatgaagccatgtttcggtcttgaacaataattggtcatcacataaatatgacatatattagttgtctcatgactggtggttgacttatctctggttggaacattctccttttttttatatttttttttaaagttcaatttcctctaatttttaaaaataattcaattagcttcttttatttttaaaagttttgtttgtcctttattttttaaaataaattcaatttgatcctttttttcatctgcttcagaaaaaattaaaaatcaaatcaaatttgattttaaataaaacctaattgaaacttttaaaaataaaatgacataattaaatatttttaaaaattaaaaattctaattgaatcttttaataataagatcaaatttaacttattttagcttgtttcttcagtatctctttactccttgctttctattactaagcattgctttatttgtcattaccaatctaaaagtttcaggatggcaccataatcaatgcagtacggtttctctcattccccaattacaatccttgtttctcactctatgtaacaacacttaatgttactacacaacaacattgatcatgtatctatacaaacatttgctttgccgaggacacaaatttgtctactagctggcatcacttgtcttccctatccatttttaacactcttcaataataaattgaacaaccctgtaagatgaacaagtatgcagttgatctaaaatttcaacaaaacagttctttacaagcctctaatttatcacaaatggaaaaaggtccctctcacttcaatttttttctttcaacatcaatatgtcaacttttcacccgcatatggctatatagcctcggtcaccaaaaattactgcaagaacaagcaccattaagaaagtggtggaatctcgtgttatccctcacaacaatttttcttcctgtaacttttgacgctccacacattacaatatgacaatcctcacatatcctaaggttcttcataatctttatagtggaaccaacatcggtactcagcaatccaaatgccaaagctagtttttcactatgagccattagtaaaagcctcttctctctatcattaataccgtatggcaccgaacttaggtttggctggtatccaatacctttcagccgttccaaaagatcatttaactccttctttatctcattaatttttggatgagtcacatcaccagcaacgaacttgtgaatcataccattttttgcttcaacccagctccaccctggattttttttcaaatttttctctctcagcaatttcctgaccttagacacatcatcccatcttccagctgatgcataagtgttagaaagcaacaaataattccctatgttatcaggttcaagctcaaataaacgcttagaagcaatttcagcaacgtcagtgttcccatggacgtgtgatgctccgagaagtgctccccacacagctccatcggactccataggcattgtctcaacaagctgaagtgccttttccaagtatccagcgcggctaagaagatccgtcatgcaagcataaagctgtgcagttggaacaacaccataacacttttccatggaggcaaagaggtgctgcccttggtcaaccaagcctgcatgactacatgccgtaagcacccctacaaaagtaacatggtttggttttaccccggtctccaacatgtcataaaacaacttaatagccgcacgagctcggccatgtatagcaaaccccacaatcatggaactgtaagaaaacacatttttttccctcattcctttaaagacatcatatgcctcctccacattaccacattttgagtacatgtctatcaaagccgaccccacaaggacattatttcttaccctaaatccagaactctcagcaatgtcccttatccagttagcatacttagacgcacccaattgagcacaggcagatatgacaccaaccaaggtaacctcatcaatctccacaccctcatctcgcaaccgccggaaaacctccaatgcatccatcggcatggcgttctgcgcataaccggtaaccatggcagtccaagccaccatatccttaaccggcaacccgtcaaataagtcccgtgcggccctcatatcaccgctccttgcgtaagcaacaatcagcccggtccaagaaacgacatcccgttcaggcatttcatcgaacaccttgcgcgcacaatgcaaagacccgcatttgacgtacatgtcgataacggcattgttgacgtacaaatcagaggcgaagccaccaagcaagagtgtctgagcgtgaagctgcgcccccaacgcggggtggcgaacggcggcgcaagcggaaaagagagcggagaaggtaaaagagatgggactgacgcgtcgtttccgcatggaggagtagaaggtcagggcttgagagaggggtccacggagagcgtaggcgcgaatgagagcggtccaggcgaaggggtttggggagtggagctgtgagaagagaaggcgagggtaggagtggaggggaacgtgggggagcgcggtgacgaggcggaggagcttggtgagtacgtaggaagattgctggaggttctttatgtagatttgggcgtggacttctttcgcctgattcaggctgctgcatctctccaggattctcaccacttcccactccaaaacccttcgcacaaccatgccccaatcttcttcttcttcctcttcctcgcttcctcacaacaaggacaattattccaactctaatacttaaatctggatctcacttcattcaacgtcaattatataattgggaggctaaaataattataattatcaaagttagattttaaattaatggattttaattctaataacagaataacataaccaataattatcaatttatttaaaagcctaatataactatatcgagaagtaagaactgtggtaggtgtaataaaaggactaggtgctcaacttcaattttcaactcagggtctcaggcacatcacttcacccgttcaccgcgaagaaacttttccttgacagagccctgtgaaggtggttgaagcttgaagattgttatagatagtgtggactgtggaccaccccatttatttttaatattagtactactaaagaacatatctaaaatctaaatcatatagtaataatttctccttctttcgttggcagcacatagtcacctacctacctggaagtgttaggtgatgtgaaggcactgcatgttcaacttgggtgacctcaaactcaagtactcaacaacccttctgcaagttggaaagatcagagatcgcgagagatggggaagagcgtgcgggatttgggagtggaggatttggtgaatgcaggaggcttaacagtgtcagaaggcaatgaattatatcatgctttgagtttgagggatatcctctctgagtttcagtctccttcacacatatggcgccaaattgtcactcggagactgctcaaaccatcttaccctcactctttgcatcagcttctctactagtctgtttaccactctcaacattcttccctcccactctattgcttcccttctctgtatatctctcttactatgccttatgacttaccactacctcaacacaaactctaattcatctttcattttttgctttttgatttcagagagcaatccaaacacaccaacctgggccgtctcatggaaactcatacccctgaccttttaggaccttcctacaaagaccctattactagttatcctctatttcacaagttttctgttcaacaccctcaggcaagcctactaccctcccacctataattccctttttttattctagtattgtgttttcaacgggtatcatttgtttgtgcagctttactggtcccttattctcaaggaactttcagtttcctttgttgaacctcccaagtgcattttggatactttcgacccttctaaacatggtgggacttggctccccggttctgtcctcaacattgccaattgctgtttgcaacccagttcacacccccacaaaacagatgacactttagccattgtttggagagatgaaggttttgatgattccgaggttaatcatatcacgcttaaacaactccggcactaattgatgtaagccattcaacttttccacctaagttatgttactcatcatcatactagtaacttgtgctaagtcggttaattcaataatttgatgtgtgttttttcaaattaatcgggattaatttgtgtatcattctgctattttacttttgtttcaattcttttcgtgcttgtatctcactttttggtttttgatctttctgcgttatgttttactctagaagtaatttctatctataatctctttatttgcttcctgtgtgaaattatatcgtttcaggttggtagcaaatgcaatagatgccacattctcgaaaggagatgcaatcgctatttacatgcaattgacagtcaatgctgtgattatatatttagccattgttctagcaggatgtgttgtcgtatcaatagctgatagctttgcaccaaaagaaattgcaactcgtctgcatgtttctaaagcaaagggtattttcactcaggttatcttttaaatttggtattatgcgtatgactttaaaagtaaagctgttgttgatcaaagtgagtctattcaatctttgatgttgtctttgactttgttctttctccgttaccaatttgtgcgtaatgctactcagtgtgtgtgaaggaataacaaaattaccaaattgttagtggcttaaaaatttttaatcttcattcgagtctaaatgtctaacttgtgtttcccgtttgatgagattcaaccaatagtccgtgcaaagatatctgactttggagaatttgttaaaatactgattccttggaccttattttagttaacttaggcttatacctgtttgatgagggtactgacaacatcatatagctttgatcctcagtattaacaaaagttggatcttgttctggctgattagtctttgtgaatgatgtgcattgcaataatgcaattaagacttcataagcttgagaaagatcaggtttttaataagtactaattaggtagaaaagtagctgcattgaaagcttattgtatgtcatgtgtgatagcagttttagtgctcaaaacagtactggtgaaaatagatttcatggtgccaagagttttagccttttaggtagagttaagcaaaaataaattaggaaatcaagtgactgaaatcttaatgatgttaagctccaactccaaattctcctatccaatcttgcaaacatcacattcgagatgtttagccttcagcataaagggagtgtgttgaatattccacattgactagtaatatgattaaaatatgagttagcttttgggggttgagttaggctcaagtccaaattctagtaagtatcatacatatagtactcctctttaaggagggagagagaaaaaacgtttcttgcaaaataagatgtagatgttccctttgaattttctttagatataaaaacatatagcctaagcttttaggagagttggtccttggcatggtataaaagtctcctgatccagtggtaaagagtttgatctttgctgccctcacatttaggtctttgatataagcacttacatgatgaacttccaaagtatcaaattagaattgttgtattttactcagcttaaatttgttttgggatttcatatcaagaggtggcaggaaattccctttgtacaggtaaaaaaatttaacattatatttatatttgttgcaatatgaaaatcatactgtctagtttatctgttcaaaagatcataattggcatcttaagctttataagtttatttgtcattatcctcaacttttggcacaattgccaacttaatatttgctattgttatttaatgatcatctgttaaagtatcctttgataaatgtttcaatattatgtttgtcttattgctgcttgggttcaaattcgatgctatgttccacatgctggtgagaagtctttgcgtttgagcatagatatacgtggttgggctattttgggaaaactcataatctattatggaacagaaaatcatcaaacacattgtatttttggaacctgctttctatagaaccctgttttctttttctcatttctgcctcactttgttttatggcgtttgttataggcacgaggcgtgactttagttaatagatatttaatgggatcacaaaggaattattttagtgacaaattatatttttcacttataaaaatgatatcctactctcagccactcttggtattttttgtgtatttcctatttacattctaactcaggattctaacaagcttagttgtcaagaccagattgaactggcaatctgaccgggaatgagtatccagacctgtttggtcaactctcaactgatgttacaaagaacttatcttagaacgaatgcattactgcctctcattggccaaactttgtaatctagatcctaatttcctaactaatgcttacttgaatgccactttcagaatattttaccatgcaaaatttcttgaccactgacctcattctgcttatttctccttgtagtcgagtcattgaagcagctgcatgtaaagttatcgctctgcctgtgataggtgatgatctaggtgtgcaattaagagaatgcgatatatcatggaaggtttttctttcttctagcagacagcatcccaggtaatgtacttcaaaatgtgtctattaagccatatatattcatcctaataaattgtaattatgtgaactaaaatagtctttgcaaaagaccccaaaaacagaaaaaagagacagagaagttgctttgtttctcttgagtattgtctcaccataacattttaatcgtgacaggtcacatcactactctccaatctatcaatcaattgattctgtcactaacatacttttctcatctggaacgacaggtaaacattctcccttaaacacatcaagcagaaactaacattgtaatgattttctggttacgtttttacttttcaggggagccaaaagcaattccttggactcaactttcaccgatacgaagtgctgcagatgcatgggctttcattgatattcaacctggagatgtctattgctggcctaaaaatttaggatgggtgatgggcccaactcttatatattcatgctctctatcgggtgcaactcttgctttgtatcatggatctcctctaggccatggttttggaaagttcgttcaggtatttgtccaactcttatatttcagtccttatagtatttataattaacataacatgtcttattctacaaaatggtcattattattttaataacctaagaatttggaaatcaaacaaagtaagtgctgactagtagcagaactgagtgggaactagactagttgttttttctgcaaaatcatggaagcaatgaagtaatatgatacagtgggatgtagaaggtaatggttgtaaggtagtgttatctatagtgagataacccaagaactttcatatcttttgtgaaaataatttgcaactgtgtgccacactgatgtcataacaaggtcaaaaaacttttctcattctttcgaaaatgctttgtcacataaaatagcattaataagatgaagtttgtgatgacagaaaaaatatattgtctcattgagctatgttcatagaagcatttacatcaacttttgcaattattttatggtaaaaaagaaaatgaggtgtccctatgcagaccctcaaggacaaggtgcttctagttgaattttaacccttgcactataggcctggatgaattatacatgcaatctgaatgagttttattcttaaaaatgtaaaggaaaggggtaaaaaacttttagaaagctagactctcattgctagaacttgacttagctacaaagaggttaaataaggtctggaagggggcaaaagtccaacataaatgaaacaagataaaaattaaaaaaagcgtcattatttgttgtagattatattgtattctgcatcaatagaatttgatacattgcacaaagcaacatcattcaactacaattgttcaggatgctggtgttactattttgggaacagttccgagcttagtaaaaacttggaagggtacacaatgcatggaggcttggattggacaaaaataaagtaatttcttttaagtttgaataatcaggtaactaatgtgaaaaactgaactaaactgtggttatatgcacagaacattttgttcaacaggagaaacttcaaatgttgatgatgacctctgtctttcttcaaaatcttattacaaaccaatcattgaatgttgtggaggcactgagcttgcatcttcttacatcatgggaagtccactgcagcctcaagcttttggagcatttagcacggcatcaatggcaactggtttggtcatccttgacgaaaatggagttccttatgtaagaatgttttcttgatagtttctattatttgatcatgtgatactatatatgttgccaccgaattgacactgctttccatcatgccaatacccacatataattttgttgctgcaatggataatggatgtcaagtgtattacataatccggactcagaaccaataatggctaattggaaatgctatctcaaaatctcaagagtcaagactgacttctaatggtcatcagttagaatgtccatatggattctccttcactatttgtttctgaatggtgtaattcttatactaaccctttggccaccaattttctcctataacttacactcttcaattctcttatgattttttactcttcccaagtgggttgcatttcctctagtagatgaccaaactatcttcaataaatgttcattgtgatatataatagcaatttttgtggtatagacaacttattttttaagctatctaatttgtttgatctctttgaccaatgcgacagccagaggatgttgcttgtgttggtgaagtgggcttgtttccaatatatatgggagcgactgatagattgcttaatgcggataatgaggaggttttctttaagggaatgcccatttacaaaggaaaggtatgattttcacattcagttaaataaagaaagaaattagagaggatatgattactgtttaactctcaactttggatgtttgtcaaataatgctattgcctatgtcagtgatcaatatctaaatgtttcttagaagtgtggattagtcagatcttccatcaaggattttcagatagtcccttgtaaattacataataacttattattagattgccttgtaaatttgtaatgttaactactcttttttttggttgttgctgaaatattaactactctcgttctattgttattgtcatctactttttcaactggtttatttatccataatttatcctgtctaacatgatataagcaggttcttaggagacatggagatataatcaaaagaactgctggaggccatttcattgtacaagggcgggctgaggacacaatgaatcttggcggaataaaggtatcatccgctatatttatgtttattatagctccttctcccagttctactctgattggagatgaagcttctgaaagctattctgctagataaaacatggtgtaagaatcctaaatatttccatgtcaatgtcctgaataaattaataagaatggaaggtacttccgtacttgtaactgatcatggattcatcagaaattcataaattcctatcttgatatccgtggtctgaccgttattcttacttggaattttctgttctgttatgcagacaagttctgtagaaattgagcgtgtctgtgatggggccgacgaaggcattttggagacagctgcaatcagtgtttctcctgtagaaattaagcaactacggttttgaattgaatacatcacgaaaagcaataacttaattatttaaagattcatgaaagtcttagtttgaaaggaaattgaaattttatgcaaattttaacctgacttatgatgaagttactgatttgatgttcacaactcattttgttactttacaggtgagccttgttaaaattgtgcccgactttccccgaacagcttccaacaaattactaaggagagttttgagagatcaaatgaagcgtgagctatcaattcagagcagactttagtaacattattaattcagtccattccctatgtctagaatacaatttatactgggtgaggtctttgcaatcaaatggtgaacatttgatattattagtgggaaatccttcactttataaagtcgtaacattgtttattgtcattgattttggtcttcttttaatgtaaaataatggaatataaagtaaaaaggaataaaatgcagagtttaatttttatgtacaatctgtgtaaataagtttgcattattaattattaattaatcagattggtatgatttttataaaaattaacaaatttatattatgattatttgtaattgaatgataaagtaaaatcctttacactatcaatacatatattattcattctaaaatgaatatatattttttgaagttaagaattaaaaagattttaaaaattaaaaaaaactaaagtaattaacaatagtataatttttaaaactagagagaggattgatttggatattttgactatctactaacaatatcgagggacgatttggccagtatttaggtaaatgtgttgaattttttttttagtatattaaacgtttcattataattttgatcctttaatttaatttttaagtttaatttagttctcttgttattaaaagattcaattaggtcctataattttaaaaataatttaattagatctttttatttttaaaaatttcaggtctcttattttttaagattggttcaatttggtcccaatataaaccaaattcaattgtgtttttcaaaactttcttagcaaataaaagagaaaataagaccaaactgaattaattttaaaaaataaaggatctaattgaatattttaaaagtaaaggaactaaatcaaatcatttttaaaaattaaagacttaattaaatctttaaataataagatgaacaaattaaatctaaaaaataaattagagaactaaaatagtaattaaatttatattaaatgcattcaggaaaactagaaacttaagggcatggacatatttgattctcttcttttttttttatacacaatatttgattctcttctaaaacaactttgcactactcattactcaataaccgttttcttatttaaaattattaagttttgaaatttgttttcaaaacaattgttttaaaacccaaaaaaatagaaatagctgagaaatgttttcctgtcttcgtcaattttcattttctttaacttctctctcgattccacactttgctgtgtgcttgcactaccctccaattttgtgagcaacttctgtcaaatccacacttagcagtttgcagtgtgcttgcactatcctccatcaattatgtgagcaactttgtttagttgcattttgaaagctaaaaacagttttttttttttttaaatggaaattaaggcacacctttagtttcgagattaaatgcacaatgctgcatcacatggtaggacctattgtctttccccaatgatatgccagcattgaaaagaatcatagaattgccaaaacaatgccaaagataaccacaaccaagaatgccaacaaagagtacaaagtaagagagcaaatctgatagtccagcatagaaaaaacacagcccaaggtagggagtcaaacacagctacggaaagatgttggattttcgtactcttcctttttcatatgcgggtttcgtatcggcgcacggtccctcaatttgaattggtagtgattttaattgtcaatcccaatcatagaaaagacttttctttctaaatttttataccccaatctacaaattatagacgtagggattaattttgaccaaaaaaaaaatattcaaggactttaagcatttcttttatcattcaaagaataatgatcaatgatatagatttcataaattaatttaactgtttttcctgaataaacattggctactaatgtctatttatgatgtaaccaagtaaagatgaacgtgtcttgtgtaagaaattctcacatcctaaactagtgtaatatatttttaaaagaattgttaattaacccttacgttcacgaaacctataaaataaagactccgtgcacaattaaagtaaaaaaataagtgtatttggcaatgctgatttcttttcaagggaataaatgccttttgcacggaaaaaacggttcaagtacgtaactactatttatgtgattaacattttagaagatattcagattgtaatcttcaattttttttataaaaagaattactcataattaaaacttattattataagttattaagtttttttttttatctagacaattggatgtttttaaaaaaatatctttttaatataattttactataggaaatgtcttttatttaaatatccctttttaccaaatattttcaaacataaaaactatttcatggaattgattataatttatttttcataatctatcaacacattttgtcccttttgctaaacgccagtttgtagtgaaagcaatctaaaacaggtattataagggtactcttgaacaaaagatatacataggcaaaaccaaaatgcatatggcaacttttaccaacaaaaatgtgtaaatggcatcaaagacactcgcaattctctagagaccatttagtaattctgtaacattcacacctcatcccaatcccatcagatgatctgctggttgacgctaccaagctttgagaaccacccctctctctcgcaaaaaaagagaggaaaaaagtgagcttaaacgaattacttacaaagcaagcatcaaattcaagtaagcattattatcactatatctcaaacaaaaacaaaagtacaaaactgaaaaagccaaaacgcatcaatagtactacatttgctcgaatacaaaactgatggcgctggattatacagctttagtacagcagcaagataccaacctaaagtcccttgcaacatgcatttggatggcagaaaatagtgatgcagaggaagcaattagtagtcatttacacaaatgaatattcaacaccgattgcagccattttcaaacaaattgcaagaaactgcaaaggacatgcatacaaattggaagtattaaaatttctttgctcctcctgctaagatcaccaaattgtaaatgctaacagcaaaaagcacaaaatttgctccaagcaatgatcaagcagaatagaagtcattttgctatgtatttccccagcctcgattttcacattctagtctcatttctttgccaagacctcccccttgcactcactaccagcagtgaccacaaaacctgctccaacctgccaagacaggcaatatcacattccaattcaaattgcgatcatgaaaaattgccagagagaggtgaaacaaattacttggcaatcttttagtacagcacgttcttggagctgtacattgctgcagataacagaaccttggattgaacaagattctccgatagtaacatgattcataactactgaattaacaacctgcatccataaaagcaagtcaagaaaaagcttggcattaacattattgaatacaactcattagtaagatgccaatcagtgttgctgaccaatcatcgagggttggagatcataagtgtcacagacaaatcataagaccagaaagtaacttgttaacttgtaagaataatatcaccccaccttaacattggcaccaatccgacaatgacggccaatgacagaccgtttcacactgcatttgtcacccatctgtgaaccttcccccagtatacaatgtggtccaacctaaaaacaaattgcaactatttatataaatcttaaaatgggaggaccaaaaatattgctccagaaactgtaccagagcacacaacttaggtaactaactcacagttgtttttgccccaagctctgcagaaggatggataatgttgttttgagtagagaaggaataccctgataagtgactagcctctcctatcacctgtcacagtaaaaaatgaataacgcccaagcaaccggaactatacccaaagaaaaaatgtaaggcaatagcaagtgcctgataaagatcataacaataactaactcacatcacggttaatgtcactgtatgcttgtatagaatttaagcgagcacagtatttgctgcttccagcaatatacatacaacatttgtgggttcttcgatcaaaagtagacccataaggacccagtgcatgtcgcagatgaaaggttggttcagatgcattagcgagtatttgagatagcatttgttgattgctttgagaaataaccttttcagttccgttttcttctgtttgtggcataccatttaataatacttctgatttctaactctcatttagaaaatatgaataaggttagaatccttaaaagtacaacattacctagcctatctctgcaaaaacctttaacaactaaccagttggctccggactagatatggcaatacatcatgctttaagctatgaaatgcactcttctgatctagaacttcttgtagaactgatctgcaagaaaagtttgtttcaggatacaacatgagtaatccaagactacgaataaaggagaaagttaaaaagtaagtgaatgtaccttttgaatgcatacaagtgggcgtccattagatcagctcttatttctatctacatgaaggacaaataacaataaagagaaacaaagagaaataagaaattgcagaagtcttgcatttaattttctattactcagatgaagaattcatattttcacagaaaatgctatttctttaagattgacagattgaacaattttcttactctaaaagcacaataaccaatttccatctctacacaagtaacaaacagaaaatacctccaatactaaagttggtatagaatagacacttatatctcacactagaagagtgataaactcataacattagagaaattataagcaggaggaacaaactaggaaggttcagagacaagaaagaaaaagtacctggccaactgcagggagcatgatcttctggattcgaagatctttttcaacttctgcacctgaaaagagttgcaagattccacatgagcatacatacaacaacaaaatgacatatacaagggaaagctagataactaaccagttgctatgtgaactaaaaactgttttgtgggatccagccctatcaaatcatagcggccaggtttcttggttttgtctttcccaccagaggatactgactccaaaggtccacttacaggagcagagcaaagcatagcagtgacaactgcatcatgccgtctatgagtagctgcaacagcaccaagtggcacatcggtaacaagatcaccactgacaacctgcagaaaatcaatacaaccataaagaacaacattattttaatcagagttcaggggcaggggaggggaggatattccaccaaaatgtctttagcagttaggtgatgtgaaatggcccgaatagcacccgctgtccccacatcctcaggaactgcagctacctggaaaaaatttaagcacaaatcatcacctttggacatagtatcaatacttttaagtacaaactatataagacccttaaggaagatataaggttggttggatgattaagaaagaagggaaggagagaaaggtggtgggttcggtccctcctgctaaaaaaaaactaacaaactaacaatattaacatttgccgataaaaaaatttaaaaataagaccctgtttgcatgagttaaaatctgcttatgcataagctaatttatagaagctctcccatcttgcttctttaaaagtttattttaatttatgcataagctaattttaacttacgggagaaacataattcactttaccttcttattttcttctctaaaagtgcttgttgaaaagtttatccacacaggcgaattcattctattttttttttcctactataacttataaaacctacataatatccttatgtttgtggtcactactgagacatatatagaggcaatgaatcatgtttggtaaattttctaatatccaaaaagtgattacctcaacgtggaggcgatcagcataagcccccgaaatccaagccccaacatgaagagccgcttcttcgccttcaaccacctacagttaaaaaaatcattactaattcactatttaccctcttcaataacatctaaaatattgcaagaaatgaaaataccaaaatgagatctttgaggttgctaagctccaagtactcgagaacgtaggagagaacggggcgattcgccaccggaagcaacgcgttcggaagctcctgcgaacagaaataagcgctttagaataatagaatagcatcgaaatttgtttggtttgaagcattcgcgttcggaacctgcgaaacgagagggatgagcttcttggagacgccaccgccgagaacgacgacttggaaatccatggccacgacgccaacagggttttgcgttttcggagggtttctgttctgttttaatttccctgactaatcaaatctcggattctatacagcacgcactcactcgttcattcgcaaacccaaacccaaaaccaaacaagcctcaccttcctttagaatttgcttaaaccttaatgtatagttagtttttaaattttaactaattttgttttagtttgactaattataaattaaaaaatttattaaaaatgaatacaaaattcattaatttatcatgaactaaaaaataatgtcaagaacaaaaaataaatttttattttataaggaattccatataaaaaataaaattaataacaagtgaacacaaaaaataaatatttattatgaatcaaaaatatatttaaatctttaattttatatgttgtcaaatactcttagggagcatgtgtaggggagaaatttttttcatatatatgaatcatgatttctggaaataaataaaatttatttgattgatcattgaaatttttgacattaaatacttatgacattaaatacttatgcatatttttttattttaatgattcaccacattatataatttggcaaagaattatgtcatgttttgactgtaataaaaatattaaactaaaaaaataaataagattttcacattccaataaaaaagttttcatgacaaatttactaaaaaaacattatggaaaacatacttttctaggaatgttatttaaaaatgcatatcaaacatggataagtttcccaacatatgattcctcataaacaaaaacctatctcctattaggcgttcccttcgagtctatttggtggccaaaataagagggaatacgatatgatagttaccatatcttattataatacgaatttgttacataaatataatatgatagtattatcttattgcttatcatattctattatttttattttaatatatttcttattttgattaaaattatgatcgacaagatagaataggagttatgttctctctttcctctctctctatatatatattataattttaaaacataaatttaaattaaattatcaattaaaataataaaattaaataattattattcaaatattttcaaagtaaaatatttgactactttaaaaccgttatataattgtaaaaaaataactacataaataaaatttaaatttttatagttcagtttttttaatcatagtttataaaaaaaatttataaattataggtaattttaatgaaacaatatttttaaaatttaaccatgtccttttgttggtgttcgcggattggtttgaatcgattttgaccaaaattatgattcaactcaatcaaatttgatcggtttagttcaattttaaaaaaaaattaaaacccaactcaacccgttcatgaacggttcggttagggccaacagattacccatttaatatatttttcttagaactactattttatatcatgattctttcgaatattcaatataattaacataatattatcaaatgtatgaaagtagtaaaattgattcatttaatactatgaacataatgttctaaaatagacttataatataaattaaaacaaaagattcttgaacaatatttactataatagtctgaatcacaactatttctcacaaattaatatgaaaaaatgggtgaaacaaataacaatatacccaaaagtaatacattaagaaatttcaacacttgcaatttcaacacttggagatctaatattaatagtattgaaagttaaacaaacgactctaaaaatttaaatacaaccccgttagcccaaaacttaattgatattttatacaaatataatatttttgcttttatgatgaaatgacatcatttcaatcattaacaaaaaacgtaatatcattattttggcatcgttgaacactgatttttaagtaaccttaatgttaaaagaacaaaagaagaagaaaaaaaaaaagacagcattcgaatcaaactttcaaagaatgttaaaaaaacaaaagaaaaataaaaagacatcatttaaatcaaactctcaaagaataaatcaaccaacgaaagaaaaaaaaaatcaggtcctgactattactcactctgaaactaattctctcaatctttaatccaaacaggcacattttcctcttataagattttatcaaagattagcttaattctaaagcaaacaagaaaaagaaaatggtaaatcaaatacaacaacaaaaattcgagtcaacactcgacaatgaaggttatttcttttcttcccatccttgtttccatctaaatctcaatgaatacaaaccaaaataatcacgagaagttaaagagcttcgaaaaagaaaaaagaaagcgcaaaggaaaacgtgatgcttgatcgatctaatgagataagatgagagaactgagaaggagttggtgcataaccgcaaagaatgagatgacatgcgagagaacacagaagtgcaaaagaaaaagaaacctaaacctgtgacatttattgtatcacaccttcacagcaaagatgagttgagatgattatggactgacccttcattcggcccaacacacctttttttattgtcaaaatatttttttagttttaaaattttaatatatatataataaaatttatttttttattacgaattaacggatcgggtcaataggccaacgaatgtataaatctaaactcgtgactcaactcatacataaacaattttgatcggttcagttcgattttgacccaaatacataaatgatccaacccaaattattcagattagttcggatcgattcgggttctcgagtgactcatacccgtgaacacccttcttcgttatctagtatgcaccaaacattcaatacaattaaagtttatcacgttcttattatatattgttcttatcctacttgtatatcttatcctatcgtattagaattggaccttagcagaattttggcagaggctcgggactctaactgcttgcttgttgaagaatgaatcgacgactcataggcaatggcttggttaagggaaaccatcggagttgtagcgaaaatgagtcttccaggggcaattattactgcttatggacccaaacctgggtaatctatccatgaccaggatgaagcttgggtgaaactaagtggaggctcgaattgactgatgttgaagaatcagtgaatgagttgtggttaggggtgaaatgccactcaaacctagatctagttggttctccccgaaatgcgttgaggcgcagacctcttcaagtttatatgtaccatactctagtctcataaggcaatatacactagctaatagtcctcatggtgctacatcataggcacactgggaacgtagataattgtaactgtatatataaaatgatagcaatggaatgtcaatccttggactttatttgtaaagtcttgattccttggtaatcgaaacccaatgatatatgaattagtcgatgtttgactagccaaaaagacatgatcttgcattttttcgcttctcctaattttttttaccaatttggtattagtcttttatatttacattatgatgaaaattttcaaaatagaattgctatttcttattgtactttaaaaaaaagtgtcaagcgatatctctaatgtaaatggcacttgataaaataattcttgaccataatcgccgatatgagtattgtatccaacatgaaacttgtagttggttgtaaaacatctattctctcactgagaccaccaaatgatcctttaacatcaaattcaccttcctttaattggtgctcaaattttgttccatacacacaacttttattttattttttatttttccatggaaaaaatatttaatatttagtttgatatgtaaatatgaagaattattgatttaaatttgagttattattttttaaaatgaaaaattatttaaatcaattcatgcctgttcgtgtttataatatgaatttttatatccattttataatatgaatttgaatggttcatggctactcttgaatataagtgtttttaagttaaattaggtagttttttttacattaatttattttttatttcttttaaatagtatcacttaaaattaatttttaaattttaaatttgacatattaatagatgcaaaaataggttaagttaaataagacgtattgcttgaataaacataaattattttaataaaataataatttaaggcctaaatctagtttattatttataatagtccatttcttagacttcaatttaattgaatatcattggatttcatcacacttcttaaaaaaattaaataatgttaattgaatattatattattattttttacaaaaaaagtcttttaaaactttttttagggtacttttaaaatcttacttaaatacatcccttaaatgatgttgtacaaatatattcataaaaacttcctttttatactaccttgtttgatttttaggattgatgcattaatttatctactttctaaaattaagaaaaaagaaaatagaaattatatatatttttcttatattatttgaataaatagagagataaaaaaagtaaaaaaaaaattatatcaaatgaaattatggcatgattaatataataaccatgacgaagaaaaatatattaatattttatttggcgcgattagcgtcagaagcggcattgttagcatcatgactcgaccatgtggcgcgattagatccagttatggcgctgttagtgccagaatggccctggagaccccctgattcgaatatctggcacgattagcgccagagatgatgcgattagcaccaaaatgctttaggaagctctttctttcgaattcttggcgcgattagcatggggtgtggcgccattagcgtgggaacgcggactggggcctataaaaggctattttctcattttgggagaggaaaaatgttcctcttcttcttcctttgcttttctaccattgacaacttagaaaagtttcatatctcctccatacctcatctaaacacttcctatccaactagaaagttgattagaattccttcatgagctaggttccagcttcaattcttcgagagaatcatcaatcagagagatcccgttctctaggggactttgtaaaactgagttttggaagggaaagaaagcgattcaaggacgctaaagcttggagaagtgattctccagccttcctcgactgtttagaggtaagaaactcaagttttaccgattgatttgtgaaatggttcttgggatgaatagtaacccaattgtgttagggctggaattagtcttggattctttagaaaaatatgctcaagaggttgttctgaggaatattgagctttgaatcatgactattgatgaagtttggttttgactctgagatatgtatgagtaggaagaatgttagttaaatggcgggtatcatgatatgaatgagcatatgtgcttttactaaaagtgttcaggagaccctatagaaggtaattaagcgttcgattgattgttttgaatgacttggttattcttgaggtatagagtggttaagcaactgaatgctttgaactagtttatgtagagtctagggagactctaagatcttggttcggtccagatagatcctgttgagggtctgtgaatcgcttataaggtggttagctctgataaccctaagatagagaacagagaggttgtaatggaaatgaatagtgtttcttttcattctaacggttgagaaccgttattgattgattgtttgtatgctttgtgtagggtgtgatattgatattactggtggttgtgaccatgaattcgggagagccggtgtagcgctgagagcaggtaagctttttgttcttgggagtgtttcccttgtttgtgttccaccatactccaaagggagtgatgattattgtatgaattgatgcatgtatattgaaattgtgtgttactattttgattgaaatcatgtacttgatatacatggattgagactatgtgtgttgattaatgagatttatctggccagtagaatataattgaatcgaataaatatatgtttgaataagtcctgatgataaatgtgcccatatagatgatatatatatatatatatatatatataccatgtacatgtaatgtgttaagagtgtgatggttaaatgatgatgatatattttataaaaagataatgatgaacccttgagacatatatatatatatatatatatatatatatatatatatgtgtgtgtgtgtgtgtgtgtgtgtggtaatatggcttgagagctgtgatggctagtttataatgccaattttaatattatatgcatgaaagtgaaccagggggaggaaaaatttccaaggaccctgagtttattgagattattatctcacccctgttggggattatgttttgcaggtgatattcaaagataggtcccagggcaagaagcctgagcaggaatagtttatatgagaaccttaggcatagtgttggagagcatattggttctacttttgttttatgcctatgattttgtacccattgatggatatgtacagttatgatttatatatactgtatattataagaattcaccatatatgatgtatagttgatgttgttaatgacgtttgatgatgtcattttgtttattgcttccattttgattgtatgtgataattgctgcgcttaacgaccataaatcaatgttaatgaaccggatgcatacggagcgttacaattaatagataattatgtctcttaaatatgtgatcaagtatttgatttccaattcaatatgagaatgaaagagcttgtattggaaaagatattgtttatatggatctcaatatggtgaaggattagccttttaactcttagttgatggatattccaaaattacccaaaaattgagattgtgagaggaaaataatccactaaaatacaatcgaaacaaaaataaatttataattttattaagattttgtattcaaacacactttctatcttaaggtgattattttacataaatattatatgaatttagaaggcataggacaatattacctctatttaaaagggataaaattgaggtatttcaatattacgatgtgttggcctatgtgagtgatggttttacagaggatctgacattcgtcactgtatttccaaaacaataagcagtttcctaagtatggcttgccatcaacccgtctttcttcaggtctacaacaagagttttattattccaaacaaggataagaacagtaacactttcatctgctttcatcctgtgaatagctcgccaagggtgattcttttctttttttttttttataggcaaatcaagggtgattcttgggcccagaatcaaggcatttcgttattagaccacctagttatgtaaatcaaggtcatcgtagaacaaagtaaatttgtaattacaaggagtcatgtcttcaacccaactgtaactgaaattatctagtcctatatattatgagttaaatggcttaaactcaactcaagaacttctagggaaagaaaccgagccaaacaaaaggcaaaaaaaaaaaaaaataaacaaggtgaaaaataaaaaagcacaaagaggacaaagggaatacaatccaaatttagccatgccattggcatcagaagactgattgacttcgggaagggttgtgcaggaaagtgacgaacgagctcaagtttgaggtcctcaaaaggcttaatactcaatttaatttaatctgatactttatattaagtatttaatactcaagcctgaggcttccccatcttgcaatgaagagctccggcagcggcgcggggtgcttcctgcggcgacggagcaacgaggacatgggcgatgcgctcctcgcgtgactgtgtcagtgaacaggccgcaaacaacctcgtctttcagcgcggagaagaacctaaacaagccttagacatcaaccgcgccctggcggcgaggcacgtcaggcccgacgtggtggagctactgctggatctcgacgcggttggtttgggtagattgaggcggtgaggatgagggaaggacgaggactactcttgatttgttttatattttttaaccgccactacacatacacatcattaaaaaacctaaaaaatatccctaactgtcacattttcgtcaaatctctaaaatactatactcgctagggaagcaatcttttacactcaccatcgcattggattcccatcaaccggtcattattatgtggtccatttataagactatatatagtggtccaatcttagtggccccaaatattattattatggataatctcaatgttctaattttcaacactccttccttggatcagcaaaacaatatactatacagtaacatttacatttgtatggtaaattcaaatgcacaaatcaaactttgcctttgccccctccattttagcaaaagaaaacaaaactagtaacaaatttggcttttccaattctggaagggtagtagcatcttcacaagtggcgagtcttgtcttgtacatcactcactatatttcaacgcaacaccccgattggacaaacccagagaaaccctcaggcacatttatctttctcaatttacggttctgcccttcctccatgtccaccaaatagaacccatgcggtgcaccttcgtaatcggatccactcaacataaccctggacccaaccgcaaccccacataccccaaccctgagccccggatccgaacctctccaattcaccaatctcccatctttcccaaccccaacacatgacctaggacaccgaccctcttcccaaacaccgtttacctccctccactgacccgacccgatatccaacacctccgccgacccatcgaacatcccttgcctctccgtggaataaccactcacaacccaaaactcatccccaatcaccaccccctcgcactcgtccctctctcggcccatcgggttcagcccggcccattcatcactcctcgggtcataagcccacgccgtactcagcgcgttcttattctcatcatgcccacccgcgacataaacctgacccaaccccgccccgatggcataaaaagaccgcttctccggcatgtccttcccccgccgccactcgctcgtgcgaaaatcgtaaacaaacactgccgtcagaggctcgtaacttgctgggtcccaccctcccatcagcacaagcttcccgtcgcagctcgccagctggcagaacagcggcagcccggacgggtaatccggaaccgggtcgacccggtcccacgacatgctctccgggtcgaacacgcttatcccgtaaaccgacttgtttttttcctgaagcagttgctcctcacgcgcctgaacgaggcacgtgacttttcgggtgtggccggttttcttcctgtgggagtaaaacgcatcgctctggaggaggcagtgccactggctgcagactcggagggcgactcggtgcgctgagtggggcaaacgagtgaggcactcgagtccgagttcgctcggtaacctgggtatcaactcgttgaactcgatcaagttggagatcgtattattatccatcactattgagtaatgagagtgtgtgtgaaagatgaagtggcgcttgaagaagcatttatagagatagaaagaagccgttagataggtcatcatactccagtagtactcaatcacctccaactggttggagcacacggataatgccatctgtgctgtgtgcattcagatattttcagtttttcatcttatttattattactaacattaaacgtcaccttctaatatatatatatatatatatatatatatatatatatatatatatttacgatataaatgtaatatcatgaattatactactatttatataatgtattttttattacattcattattttattttatatttatgataaccaattataaaatgttatcacattgttttgctccatttgacatcaacagcacataaaaaaaatcaaaagctttgatagatggataagtatttatttgtaaatatatttatttataacatagtttttcatatatacacgtctttgataataaaattacaagtatgtaacaagttatgagtaataaacactcataacaagtgaagaagactacatagatggtgtcatgtgtaagtagttttaaactcaatatagaatcattaatctttgttttcctcttgtttttttgtcatttatttatttcttgttaattttatatttatctatagtctaaaagaaaggcattcatgagtatggttattctgtaatcatacacatgatctacatcatctctgcatgcatcactgcacacatgattatttaacaacctaattagtcttgtcaaatatttttgactcttatattataaatttttaattcatgacttcaaaattatatatgaagactcaacaacaatctagttccttctttaaaagtaaaaaatagtaaacttatacttatgactcattagacaagtttctttctcaaacactttttttatatgtattttgttttcaaatatataaaagttgacattagtttgaatgaaaatgaatccagatatcttaagtaagatgtcaagtttggattttattgatgaaaaaatattataccaaagataggtcattcaacttcgggataaaatcaataagtattttgcagtaataaaaccctacaagcttacccaaactactgacactccacaggcgtgtctagaggattagaatattaaaattattagtgttgttttcattgcaggcttgcggttaattaagtactgaaaatgtggcttttacaccacttgggagtccgtcaaaaagtggtgtgtccctgtcctatgtattagagtacaagcgttgttgtgtggtcgtcgtttttcgtttgagtgtattatatatgcaaatgtatgagctgaaacggactaagttggatttattgcattaatgcacttgagaacgatacaatttcagatatcagtaacaggtctatcattcgatcttcatctattgattcggattgatattcatcccatatgttgttagcaattatcgtgtgcattgcttgagttaaaaaatatgaagaggttcaatttaagctgaaacaaggttttaaattatcaagtgcaattataaggagattaagacccatagttcgagttattttatttcaaaaataaactctaatacttaaaaaatttgtagaacaaacgaattcacattttttacaaccaacagagtggttgggacagattctcttcctaggaagtataaattttgaaacactaaacttattatacaaataaatgaagcttataggagtattttcttttaaaaatcctattttagtcgttgaaagacaaattcatgtattgtccgcgtaaatttgttaccctattaattcattaaaaaatattattaatataatttttaagataatttattataaaaattaacaaattcatctacataataatttataattaaattacaatttataatttattaatatatattaaagttagtgttaatgacaaaagattccattatgtattgtttttttttgttttcctgttaattactgtaactgccaaaagcgtagaagtggataaggatgaattatgcatacgtgtgtagggaaaccaaaattaatcagacagcgaggaataatacaatagtcaataacaatttctatctttctctgtaactttgtcgaattgtccttctcatagcaaaaaataattaaataacccaaaaataatacatccctgtgcccaaccctacatccagggtgtcgtgtcttggttttaatctcataattacttttttttttctcaagtgagaattttttttaaaaaaaaaattacatgtgtcgattgaaattaagagaatactttaataataacataatagtttcctaaaaaaaaacaataatataatatcacaatcttaatcttaattactattttaattaataaatatatatacatatacatatatttcatttaaccagctctgcaggagtcaaattcagagagaaaaattaaaaatacatgtatttgatgtttgactgtattttgataaatgagcctttcattacccaagagtctcaaaccctcttttcctcctaaaaatacatgtatttgtgtgttgtgctcgtgtaatttatttctatgtattaaaaatatttgttttagaatagttcaaacttctgattaaaaaaacagttcaattttaattaatatttcctttttttggtgtataattaatatttctgtaaaacgtcatgatgattttaaaattaattacccatatattattataattttatatatatttagtataaaattagattatcaaatatccatgcatttcacaagcattctctaaatttaaatgaattttaaaagataaattgaaagaaaatacctaatattataaatgatttgtgtataattatttcacgtagaatctgaatatttaaaactataaaaaaatatataattatttcagaagcatttcaatatatttaatggataaaatcttaagtaaaaaaagtttatcatcaaattagtcattagctatattcatttgcaagaaagattaaagtggtgatgtaattataagggattagttgagtgaaataagacattattttacatatgatgtctttcagggtcaagctcttatgtgtttttttctgtcttcggagtaaaataaacataagtactttcataaatacttttaatccaaagttataaatgataagttgattgactggtataatactaaatttaaaattataatatcataatttgttattcatgtaaaacatagtaattaaaacacatgagtaaacttcctaattctatgaacaaatgttatggtcccactgacacattagtacaattagtaaaataaataagtttatattttttatatgaaaaaaaaactgtcacaccaaaattcaattcacaaagtatggattgtatttatgcaattaagttattactagtgccatgaattttgttattaagtaccaattattaagtgtggttgatcaggggcttaatctgttttcttccttccaatttttattgttgtttagttaaaaaaaatatgcaatgttaatagtttaaaaagagttaagagagagtcatagttttttaattaatgattaaaaaattgcgtggtggctaaatacaattactttgaaatctaacgtggaaggatgtgacgtgcaaaacaagataatctcaattaccttatccattcactctccatttgctaatatattggtatgacgaaatttgtacataaacctcaatgcaatagttgtattttctaaacagataaatgcaaaagtgaatggcccagaaacaaaaaacagaaaggaaaaaaatactatatcagagggaagacaggataaattcttttaatcactagaaatccattaaattattttaatagagatatcctatttcatgatttgattttactttaaaattcatttgtaaaattgtttacatgcaatgattgcatttcatgtaaaattaccatcgttcatttttttaaagtaatctttttaattataaatacactttcatgacatcattaggacgcgtaaaactaatgtttaacgcacttgcttaaaaaatgccataattattaactcttaacaaaggatgcatgtaaaaaaaagaaggatgcatcaatatggacatctagtgctttgtaacaaatataaatataaatataatttaagatttttgtaaacggaaatgtattatgtgagaaagatcgaaatagaagatttgacttgaaagtagtaatagaagcagaaagagggaggagagagtgaaagtgatttggaaacttggaatcatcggtgatttggcaacggatgagcgtgattggagtagtgtgaatcatagggtgagtggttatagaataatagttcagccgtatacttcttatattaactctaaagtgattgcaagatactccctctgtttaaaaaatacatgacattttaaaaaacaaaattatttcaaaatatatgtcatttgtagaatcaatgatatattaaatattttttaaattattattaataaatactttatggaagtaatgcataaaaaataaatgaaatcattaattaaaaagataaaaaaatattaaaaacattatttaatgtatctttttaaaattcagtaaattaattatatttctaaaaaaaaactttaaaaggtcatatattttagagaaattaatttatatgaaactatgtttaagattttttcacaaaatattaacttaaatgcaaactttatttattgttaaattaaatacaaatttattgatagtgtaaatgttgtgattaaattgtaaatgttatacataataatattattattttataataattttaaaaatcattttcaattaactgacagtataatgttttataatgatgaaccataaaaattgaactcatatttacattagtagaagaaaaagaaatggaatcaaattatatttcattctttaaatttgaaaaatagaacgaaactctctaaaattcattctattctactggatccttttatttttagttcttttttaatctaaaatataaaataaataaaaagtttctcttatttatatatatatatatatatttaaaattatttttaaccgatgcaaaacttaattttttcctgatataaactgaaccttgacaaaataaatactgcctaattaatcttgtcattttctttggcagttattatatttataactcaaaaaaatttaaaatacaaactccgaaattgcatgttgcatgccttttagctagagtacacgcgtactcagattttgtttgattaaatttaatggatataaacaaagtggaatttttaaaaaaaaaaaacttaactagtaaaggacacattttataattattggtaataagttattattaaaaatatattaaatgtataataaatttatggtgttatcacagaattttaaaagttttaaagtattttttttttaagttttaaagtatcatatctcttaattttttatacttcaaaacataattattaaatttggttcagataagtggagatcagtccaataataagtggagatcaatccattggactgagaatcaaatatccaattcaaatcacatgttggattagatatgcacttgacccggaatgacttaatttgattcaatgtgatttgactttgaattaataacttagttgacttgatgagtcatgaatttttcattttttaaaattttttaacatcacttatactaaaaaattaatttatatcttacactttttttgtttataaaatttcttgcttgttttgtttaccaaacataaccgaatattgaaatttaagatgataaaattattgttacttttaatattttcttagctaatttacgcgtgtgtattagattatatctaatagtgtaccaaaattacctttttgtatgctcaaatttcaacttaagattgtgtgtactgaattttgaaaaaacatattgtatactcaaaattttaaacaatttcataactattgttctaaatatgttaaattaggttaaactttaacttgtaaatgtaaagtttatatgttataattttttttaatatagatcgaatcatgtggatcaactgatgactaaatagatctatccttgatccagtaagtgagtacctaaccaaatcaataactaaaatataaaataactatgctttgaaatatttatatataagttttatgaaccaatttatctctagtagcaaatataatagatttcaagttttcaaaaacgttaataatatgaattaaaaaaaacatattattagtaaatgtcatttatttattcatttgtattaaataaagacaataacattcaaaataaaatttaagttaaattttccatactctttatcaattgtctatgtctattttttttttttatttggacacatcacatttaaacatgttaaatagtgtgcttaatatattgatgttattataattttgtatatttcaaacgtgttcttaataagaattgcataataattcattttataaaataaatgtaattataattaagataaatttgtgacattaattagataaaaaaaaatttcaagtgtatcacactctttgacaattatttatacttattttcacattttgaatacttatattaaatgaataatacaagttaaatatacaattcaatttaattatgtatatttatgtacaacttaaatattatatttgtaatttaattatctattgtggttttgcatattttaaatattttttaattgtttagttctattaaataaaaataaatacatttacgataaaataaaattatgacatcagtcatacaaagtaaaaataagtgaaagttattattctttgacaaaggtttatacctttatagttaaataaactaataaaattcaaataaatacactcaatttttttgtttacctcatgcttggaggggtcaagatataataaatacatttaaaaaaaagagtcaatatgatgtatggttttgcttgtacaagattgagtcaatttcgcctagtgaaatgcaaattattcaatttctgctcccaaacttcatacttatttgatttttgaattttaattcaaataacatatagattaaatttgcataagtaaaatgataattttttatacaatttatgagtaactaaaaatagtgaaaaaaattatgaaaaactaaaaaaaataaagataaaacgaaagatcaaagcatattttaccctataaaaaattggtatctacaactgtaaaatgtagtttgggacacttataaaattaacatgttacaatcggttcttgtttttcttgaaattaatataaaagattaaaaaaaacaagtcataagagactacaaatacaaacaaaacgtattttatcctataagaaattggtatctaaacatgtaaaatacagtttgggggcactttcgtaaaattaacaggtttttaaaaatcaggtttcaaccggtcacaccatgtcaccacaccctcactggtgtacaggactcgcataatcttaatgggaggacgtttgaaattttcgacagtacaaacaagcaaatatttatccattaaaattcttgaagcattttactttttcactatggatttggaggtttatacgccacgcatgtattacttttagtttacatatatatatcaaaataaatatgacagggacgttctccttatcctttcagaaaagataaagggagagctctcttttcagtcaaaatcaattgaaaacattcattgacttgggttgggttggaagaatgtggggtagttaattaatattgcaaaaagggtacatcatttccccatacatatatattatttggtacttcatatctttaattacctcctttagttgtccttgaaatttttctttttcaagttggtttgcctatgctagctgattcttttgtccgaaccaaaaaaggaaatgacatttcatgtgccaagagcctccatctgcaccgtcgttagttgaccaggacaaatccaattaaacttcataataccaatattggactgtatacacatgagtcaaacgctgtgtttaagaatattaagggtacgttaatttagttttaaaaaggaaaaaaaagaaaaagaaaaaatagtatgtgtattatttttcacactgttattaaccataaattactgtataaatattttttagactttgataataacttctttaaaagtaattaaaaatgatttttaattaattgattgtataattattttacacatataatacatgtctcttaaactcagacagaaaaataggtttgtagattgtttgacaagaaagaaaataatatatatatatatatatatatatatatatatatatatataacaacgtaaatatatttaatgaagaaaatatataatcagcaagtcattgatttaagtgattatgagtttggtccttttaaataaagtttcgtactcaagtcttataaataaaaaaatatgattaaaaaatcaaattccttaataaaattagttataaataaaattggtgaatatttctttttcatttttctcattccaaacttgccctattatcctaattacaagataactttttggtgtgcggaaattcttttattggtctttaaaacaacagtggtataaagtaaattctcaaagtaattattataaatattaataatgtttatcatattataatttgagtatattgtatttttttttcatgtcattgctgtatttcaatttattcaaatttaagtaagtaacttttcagttcttaatttcttgacaattgccttaaaatcaaccttaccattatcatgtaggtaattaacgacattatgaatgtataaagattttgttagcaaatcgacacgctaattataattgtcttttaaacgttcctataatatttcaaaaccgaagatatatatgagtcttgaaaaagttcgccattttggacaagcagatctgcagatgggaccaggaaatactggaaaatgatcgatcatgaggtaacaggaagagcacattgtatagtaaagacaaattaaaagacctctataactatgagcatcaaccacttgattaatagcaggttaaggaaaaagagaaactctgaatgttttttttttggtagtatatccatccgtgaatatttgattgaaatttaatgacaaaaaaatgtttatttatttattttaataaagtttcatttcttataacatttattgacaaaaaatatttaataaaaaagttgtttttggaactaatttaatttaagatgacgttttattaataacattttttgtatggttaaaacatttttagatgaagtttaaagattaaaagggtaaattaaataaaaaaaggaattacattgtaactaaacattttcacccaatttttattatttcaaatcaagtgtgcaaatcacacaaaacaaatgaattaaattaactttttaaaataaaaaaaaatgagcatacgagatatcactaaaatgaaaaagaaccttacataggacaatactccttataaaaacatttttctgaaacatgtgggtatataaaatatatttaaaaatttattaatatatttactaccatacttttatttaaatttaaactgaataatgaataactaataatatattaataaattaaaataatataaaatttactcatataaatttaatgtgagtgcaatggaggggacactagtttcatcttgttgatagtggattttttggggttccatatatgtaaaggattggataagtttgaatatatgcatgttgatggagtgagctctgggcaactgcttgttattttatgtggtattggcgcaacttgcatgtccatgatgggttttcatgctgtggagcttcgacttgattctgaaagtgtagtcaggtaactgtttttgttttgtttttctctaacaatcatttcccgaagaagaaagatcgttactttccaccgaaagccagctagggataacgctgttagtcacgagttatccctttcccttgatttacttgcccacttccatacgatttcacattcactcatgaaaaaagtaactcacttctttaatattaatcactatcagaagtaattttttgaaaatcaaattactattattctcataattctaattaatatttgttagttatgtagaaggacaattaatttttattaaataaagtgttatgttctaattttgtgaatgaaacataaatattgaatattatatttatcttttaaaatagatttatcctggttgatttaattatttaaaatagaaaacaacttatgatatgaaaatcctcaattttttttagaattttattttattaataatattttttctattcacaatatttagatatgtaattttgtttaaatagttcaaacctaattttagtcaggtcaatgtaatgttggtttaatattatttgtatacattcttataagcttcttttgaaaacaaaagtcaattttaaaattatttacatgtacaaatataactatttggaactcttgcattaaaaaacagtactcatattttatttattaggatgaaaataaaatttcatttaaaaaatgaaactaacttattatataactatttgaattacctttgcatatattttaaaatgagaaaaaaaagttatgtacaatataaaaaaattatacaattatttaattataatccattatgtatgataaatttgttgatctttaaaataattatattaaaataatttaaacaattatttatgattgaataacagaaatttaatggttaacacccaaaatgaaactatttggttattgctggaagtatttttttttttgacaaagagagagaattgggctagttgttcaaattagaagattttctcctctgtgcacatgaatatattgggctttcggacttcttgctccttcaatgtgtgatttttggatttttcttcatgcacaacacaaatttcttcatacactcagaaaagacagcaaaaaattaaaaatgccattccttaagattcttacggatttgccaatctgtttgggcttactgatgaatccgtaacctcatacagattgacaaattcgtaagaatcttactaattatgaatatgtaagaaccttatagattatggatcgcctcaacgacctcatcggcattgtcgatggagagatcatggcaaggattgtggtcgaggacggagaaggggatgccgaggtcaaggacgaagtgggaagtggagccaatgctgaagccgaggaccatgccactcttcacggactccatggcgttgtcgacggcgagtatcttaagggtgatggcgcggagataaggcgtgcgacggcattgtggtgtgcggatgagagagatagagatggggaacaggagagcaggaatcacagagggaggcagggggagtaagagcagctgcgggagcaggcatcacagaagagggcggaggggaaggagaggagggcggagacggcgttgagggaggtggtctgagcatagctgtgacgactaatgacggataaggattgaccaatctgtatgggccaatttgtatggatcatacttattaaatttaataaatatattatatttaacaatacaataaataatacattgaatatttatataaaatttatattagtaattttaaatatatgtctcaattttttttttcgaagatatatatacacattagttatttcccaattatcaatgtatataagtcaattactccacaacattaatattgtccacatttttccttttcttttcagctttaacaccatcagttaccaaggccacttgaggaagcagttaagcgttacaaataggcatttcgtacgtacacgagagaaaagcaaaaaaggacaaaagggactgactcatttttttttttttttgggtacatgtctatttcttttggtgtatactcaaaatcaattgtttaatttatcacacttgatattttttataaatagtaaattctgtttacaatattttacataattgtacaattatttgatacttcattaattatttttattttaatattaacatatttttaaatcgtcatcaagacatttgcatgacaatatttatactttaaaacataatggctgaggagaatcaaatttctcccgcagaaatatacacacagtataaacaaagattcttctaccccaaacaaatacttttggcaaagattccataaaaaaaagcaaccataccaaacttctacaaaacataatcattttcacccaatttatctcccacacgactgaattcaagccacttcctagacttagaaagattcatgaaataatataaagcaatcccaagacaggtcaagaaggcactagtcacatacacaattttggaagcaacactcatcacatacaccaaaagcacagatggtacaaaacacattatgaccaatccaaagaaccccaatggaacctgaaatggccttttcaaagcagggaatttcctcctcaaccttaggaaagctgcaaactccaaaagcatccccaaactgtacaagaaattcacagtagatatgatctctgtgaaggtcaagaaactcatgccaagtgctataactgttgagatcaaaatggccatccaaggagtgttaaaccacttagatctttctccaaaaattcttggtatgaatcccaaatcagccataccaagaagctggtatgcagcactacttagttgggcttcaaacagcccaattattgacaaaacagcaccaatttccatccaaattttcaaccaattcccagcaatgaccccggcaacatgtgcaaaataccctccaacccaactttgttgatcaagtggcatagccccagtggcagcaaacaagggaattatgtaacccaaacaagtaagcagccctgcagataacaaggcctttgggaaagttttatgaggctcctcaacttcaccagctagagtgctagcattgtcccaaaagttcaagttccaaaagatggtgttgaagtaaagtgtccaatccttctccacaccctcttgaccaaaacttagccacttgttggggtcaattttaggcaaagaaaacaaagacaataacacaaaaggcaaaagtgaaacaacaccaagaacaactgcagtataacccactatagccaaaccagaatagttcaaaaaagacaacacacaagtggagagaaaaatagacacagagcgagggaagccagaagataaagcggggatcaccaatttgagatagtctatgcagagaaccgggtatgaggctaagttgatgaccccactgaagaacttccagaagcccatgagggagccccagaagggtccaaaggcttcattggcccatatcacaaacccaccattgccagggaaagttgtggccaattcagcagtgagaagtgcctctggaatgctccaaatgaaagggaaaaccacaaagccaaggatggctatcagagggcctgcagcacccactgaaggctcttcaccataggggcctccagcaacctcaaaatagataagaaaaaccaaagggagaagtgctagcttcttgtgtgatttggtcttggaaccatcttgttctgtctctgacccttctctatgatggtttagaagatgttgctgctgggaacctggagttgaagtgtagagggaagaatcctccatgttgggttattgaatgattgacttcaacaacaaaattctagttataagatgaagataccaatcaaagggttggaattgaaaatatatatatatatatatatatatatatatatatatatattcctttgcgtaatctcacaaagacgttttaattaattatgcttgcaataatccaactacaaacgtagccaacaaagcgaatacatgatatcttgacgtgtactctaattactggtcccggtcttgtggggaaattcttaattccgggcttcgatttagttgaacacttttttttttactaaagaacttcgtcaaacttggaacgtgtttatggagcaaaactttgatcattttatgcaacaaccgaagaaatattcatcaaaaataaaattgaagaaatgattttctctgtcaagttgttctaattgtttaaggaaaaatgattttaattttattttgtgtttaaatgttttttttttttttatattctataccttttctttttttatttttaataccacctaaaactcacctaatcatgaaacatgaaacatgaaacatatggttatggtttatgtcaaatgatttggttgattcacatcattgtaattatttcaatcatttattgtgaacccactcaatttgggaattcacatggttgaaatatatggaatttttggctagtttgtttgatgtgtgctttacaatggttaagtgggggaggaggaaaagcaagtgtgcccattgagaaagcttctcatgttattgttaattttgttctccgtcaagtactttgtttgtgctcagggagttgttatcggtccttataatcccttaaattttaagagtatctctccctgaaaaacattacggtattgtgtcactgcaaaaaggttttggactggactccagttaataaagacttttttctttctttctataaatcactttaatatttaggtttgtacattgaatcaaatgtaaaggagttaaatataattctggtaaggcattataaatataaatcatatcaatatccaatattttttatagtttaacccacgagttccgaataaaccactttaatatttaggtttgaacatagaatcaaatataaaggagttaatatataattgttactcttacggaattataatcatatcaatatccaataattatttatttttattttaacccatgagttttgaataaaccactttaatatttaggtttggacattgaattaaatatataggagttaatctataattgtttcttgtacggcattataaatcatatcaatatccaatatttaagttttttagttgaacccacgaattcgagttcagaataaaccacattcatatttaggtttgattattgaacatataatggagttaatatgtttcctctaaatatattaattcaatatgtttcctctaaatatattaattcaatatgtagaatattcgctttaggttattgcgtacatatctttgactttgaaaaacaaaccaaatctttgtgaataaatacttattttgatatctaaaaatatgatctctaaaaatataaagtattgatagattgatgattgaaacataaaaaatttgaatttaatcttcaagtataaaaagtatgataaattaattatattattaattcttttctgttatctttaatttgtgtctatatgacacttctaatgatgaggtgacatttaagaattatcatatgttattgacatgtttaaaagttaaattttgaatttaatttctaaatttaatattttattgtcattttactttttaatttctaaatttaatcatttattaatattttggtctttgaacttgattacgtgttttcattttagttgctaaaaataatttttaaatgcttaattaaatcttatactaaatatgaattattaacataatgattatcatatatccttatttctatattcattaagaaaaaactaccaattggaattaaagatgataaagatgattctacggagaatctaatagtaaaaggagtatgattgacaaagccaatatcataacgagaaagcgaacttgatagcaattaaacagactagtgatagcaacggattgagatcttgagtttaaaattatactgtaccttgtgctgtgttaatgtgttatataatgcatcaaatttattgaaatatagttatacactattttttttatcatctaataaacaatcttaatggatgagatctctggtaattgtaggtaatctcaatcgataacaacttggtttgtactttttttttacacaacttgttttatatgatataatgatgacactagttttttttatgaccacatgtgtatttaattaatgcaactgcatatttaaaatttaaatttgagtacattaaataaaaataattccatactagttaatcaatatattcgatgatatgataataaggttagaatttattttttataatttttagaaaaacaaaaaagtattacttttttctaatataatattagattcttaatcaaatatgtttgactataattaataaaagaaataataatacactaaatagtccacattaatagaattaaaaaatatattaacatttaattgcaaattctcatttataataaatttattaatttttataataattattttaaaagtcttattcactatgtttttagattagttcacaatataaaacgtatttatactaattgtcaatacataaaaattaagttcataataatatcaataaaaaggatgatatgtatcaactaaatgtaaaaatcaatcatttccaacatacttaataaaattgaaaaatatgtttgaatggattaatttcacatttgacattgttcaacaattcaacaaaaatatgttgattataatttttattaaaaaggaaagttcaagacgtgtactataagtttatacatttttttagggtgcagaccgtaacatgcttcccaattccaaccgcaagttcatcacgttagcactttcccttccgtttaggacattaaaactaatgaataaggttatctttcataaaattacctgaaaattaaaaaattaactaaaaaataaaaaattactttaaaattaatagttcaaagttaaaaaattatcttttttaaatataagtgtttgataaaattaattattaaaatagttgaaatagataaaataataataaaaataataaaatcatgatttatataaaaagaataataattttttttgataaatatatcaagaataaaaagaaaaataataaaaaattttaaattaaaaggtaatattttaaaaaatgttaaaaattattaaaaaattataaaaaaaatttgtttagtgaacaaccaaacaaaattttcaattaataaataaattataaattaattaaaatatcttgtcttaagattatgtttaacaaacttatatgaaaaattagctaaaagttaaaaagtaaactgttttagttgaaaattaaaaaattatcttatttaatcacaagtgtttcataaattatttgttgaaataactaaaaatgcaaaattatacaaaagataaaaataataaaatattaacataaataaaaaaattaaaaaatataataaatatttaaagacaaaaaaaataaaaatctaaaagctaatatttaaaaaatattatttttcaaataatattctaaaaaatataaaaaaactcattcataaaaaaattttaaaaaattttctatccaataaaaaattaaaaattaacttaaatatcttatcaaatacactattttttaagtgtaacatcatgataattgataattcatatagaataaaaccggtgaaatactgttcaagaattcatattgtgttaggggtcttgtggctttgttgaatttatcaacatataacattaaaactaatgaaataaaactaaaaatgcaattagtaagaacatttgtttcgaagaacgaaagtaaacgagaaaaaaatttgcgtttgccgggagtcgaacccgggtctattgcttggaaggcaattatcctaaccgttggactacaaacgcttgttgaagttgctcaattttctttaaaattatctttataataatctctttgattatttcatggattcaaatgtctgtagttcagttgcgtctctaaactgcactgcaattcctgaattggagtatagaggcacggagggaattcatgtgaggactgtgataccttcagcttcaacgtgtcactctcatgattttcaaaggaaaacaatcatacaagtatcatcttcttcatcaacaagaagggttcctacccacaacagatatttacgctttgctgttcgggccagactatctccttctgatttcaaggtacccacgtaacaatttctgcagaattttattaaaaatctaaacgtttaacttttagctttatccaaattaatttcaattttagtttgcttcgttattgatagattatgggaatggatgatattctctgtacctctctgttaatattttttttaacgaattttaatagcatcctgtctttttaatagtacttatgtaaatacaatttttaagattttgtgtcctttaaaacggtggattcacttcatgcatatacaaaagcaatgatttactcatagaaaatcaaacattaagattaaaataatttccttgtttattatatatttgaatgtattttatcatcatataatcttttaatttttcaattaatgattgtaaatattgactttttcctctaaagttaggggaatcaaatataaattttcatataattttttcgtacaaaaatctcatgagaggatttaatccagttataaaatacatgctggttgttaagatacggtttactctttatacggatttgcatctatctggtcagttgtccctaaaagtcaatgatcataatcaattatgatttttgatcatagacttcacagtcaattattatatagtcacgtcatttgctttagtggggtgaagtattaatcaaatccgtcacatttttaatgctgcaattatgattgcaacttgccaggtattatagtgtaaaagattattgcaatgaagctaattggttggttttggttgtccaagtgtttgttggcttcatctgatttatgcatttacagggtaatttatgtaaaagttcaaaaatttgtagtcaatgatcactttagtatcctggaatcttgccttctttttttagctttaacttgagtcatacacacgtgaagcttggtttaaccaacttctattaaattggcaaaactaatcagtttagtatttgttgggtccaaggcctggtattaactaacatggattgctttccacattttttttttaccaaaatgtacttcccttttctaatttatgggattgatcagagcctcagaggtagttccattgattatctaggttgccaactaatttaatttgaaatgcagacccgagtgatttcttttcccttcacatgcaatggttctctatttttttactcctaatttgtgatgaaagatggtaagggaaagggttatgacgtaataacacatctttcagtaatgaagaccatttcaatgaagaccattaaagtagacattttgatcattaatgttctaaagaagtacttgtgatgttgcataatattttagtttattcatcaatctctgatgtttccttccacagattttcagagctatgcgaggccttcacatctcttgccagcctctgaagtgaaagtgtacacaaatacatcagtagagaacatttcatcatctttgaaggaggatggatccacatctttatttagggtcaagttagttacaagcaacgcatatggctctagtattagtgacttaaatgctggaattctactatgcttgatagatgaaaatggaaattccatattgcaaaggatcgctgtgagtttgatgatggatcattctacagaatcaggggatatgactaatattgacatgcttcatttccaaagaggttagatgaattcatttttgagggtcctaaaattgcacaacttaaggctctttgggtcagtgttgaatcagttatgttattattgtctatttgttttcaaatgattaaaatattcatagacatcattcctgacctacaattttaaagtgcccttgattaacaggcttgtctacccacaagacaaatgctaacaatatactctctaacacactttttttaatacactattattagttgaaatatattagaaatcacaattttgtaggttttacttcttatttaatgagtctcactcgtgattttgaaaagtttctaataaatttaaatcattaggacaaagtgtatgagagaatgagttgctagtactcctgccgagaaacttgtttttaggtaccaaggaaaatatcccttctgcattctgtgctaggaagccagtatactattatatttcttctggcatcttagattcgaattccagtttttaaatcattatgcaaccaatatatgctctctgtgaaacaacaacatcaacaacacctttaatcctatgcaaccaatatatgctctctgtgaaacaacaacatcaacaacacctttaatcctagctaattggggtcagtggtagatgaatccaatgatagatacgaggaggttgaaaagaaaaagacaaaagcaaagaaggggaaaagaaggaggggaaagatgaagagtaaaaagactaaacaacaggtctaaccctccaccaagcttataatatgctctttgtgaaacatgaagaaataattgttggtacaatcattagttcatcccatatttatctgtttaaacctaggctttctaacaatacccttcttctgtctctaaggtcaggtcagtggcgcctaggaagtgtatccttaatggttattaattgtgaagggcaaccatctggaccggaagatggggtaccaacgtatactggcttcctgtatgactttcagattgatgatgtgttgcttggtgagggagctgatctgtccatgttggaattaagacctagccttgtgactgagctggaagggattgatcccataagcatcttcaacaaaggacttaatgaccctaacttactctcaagttctaaagatctcaaatgaagagagcatgaaagaatacgcagatttgaagttctcattgttattttatgatgccatgctgatgctttttggtacatcagttgcttccctcttggctggggaaaataccgggattgctttcttgattggtggaattggaggcttcttgtatcttttactgttgcagagatcagtggatgaattgccagcttcagaattaatcaccaatgacaaagaaagaactgatgttttgttcagaggagtgaagggtccaatagcaagtgtaacattggctctaggcttggctgtaattgcatcaaggtatagctcaggagatcttcaggtgatgctaacaccaaaagatctcatagttggaatggtgggatttcttgcatgtaaagtttctgtgctgttggctgcattcaagcctataacactggattcaaagttaccaagtgatatgtaacattgtactttttgtcgcttgtgaagtggtttaatttttaaaccaggtgtaacttacaattatcaataccgtgactattgttgctgtatagtgctcattctaagtgtttcttacatactcttcggctggaaaggaatggaacaggggaatgagattttgataaaatttgttcattttcggttaaggagtttgaagggatggagaagagaaatgaaggtcttgaaatctctttccaattgtttttgttttttctctaatagagggagagttttatttcttccatttcttttctttaaaaaattagtcaagtttcagttttaaataccgataatatttaaggaaacacaagtacaaatatgagatatgggatcaccattacaaatttctaaaaattaatataacgaaattattgtaatattaatataaaagcatgaattagaagttagaataaagacaataatgttttataagttgtttctgattattgtgaacacaataaaaacatgttattatttgtccaattactataatatctatcccgtattagtatcagaggtgatacgtatcaaaataccaatagtggtagttttaagttttataaggcatgcactgacaagtacaaatttgtacataaactgattaaaattatttttcaatggttaagataattattatttgtccaactaattctgcccgattaacaaactcaaccacaaatactagtaattggttcagtgcattaagagtctacctttctttgtgatgaacttttccagtttggttgaactcaaggatgttttctcaagaagttaattgaaatatggggagtttacgaagtgcagattaccagggtaagtttcttttgaacttgcggctaatgatatgttttggttgacaaggatagccttggcaggtaagtacacttcgagtttacagaacccatatgaacgatattgtaatgtaagaaatataagttctaaatttaattatttatggaaaattctattgaacgatgaaactgaatcaagacatacgactgtagtcatgtgggagatcttgcccaaaaccacagaaacactcggaaatgttaccacttgaggatgtaccaagattatcatttagacaatagaacctttcccacatttttattctatcaagggaaattaaattcgatcaactgcactagtgcgtccacccatctcgacctcattttccaacacgtgctaaaaaatagtttgcaactaatgagaaatccattctgaaattaaatgcaacaaaaagtttttcccaatgtatcaaaaagccataagttgcatagaggacagcaaattattattctttgaataatcaaacagaagatcatgtcaagataacaataaagtttatcaagtcatacaatagttctcttcaaaaaagtcatacgatagtttacaaaaactcgattgattttcgccaagcttcgcagagtacgaatataattagaaaaattgaaagtcatttcatgtaaaaacaagactacctattagaatataattcttacaagacgagtaaaaaatcataaaacaccattaaaagatatgttaaaagcattatcaatctacagaaacccacccccttaacaataatactaaattgagaaaagaaaggtcaagagacttgcaaataaatagaaaagggaaaaaatgggggaaaaacattaaaactgatacactgcaagctggaatgatacacatgcccacaatagcatcgcctgctgctcagcttccacttcgaaagattcagttataattcaactaaataacacatccagcgaagcctaacttcaaaaatataagtatcaatgtgattcatggctgatttggacaagaagatgagcttgcacattactgcagggcattagttgctatgctggtaacagcaactcgaccaaaatagtatcataggaagtaatcaggcattctcctggttacatcaggctctcccctccttggagctggctcaaactgagattaaaaaaaatattaacatatgtacaaaagactaaaaaagagttacagatccacaacatattacttgagtagataacaaaaagaaggaagctcaacctgaatgaatgtgtgtcctttgcagtcatcaacctcaagaattgatgccatgttcccacaacgataacaatagttaggtgcactaaatatagtaaccaccttttgatcctgcaacaagggactataaatcaactacttaccacaacgaatgaatataagaacaaacaaaatgatatcaaatatttacatgtccccagttatatccttccataaccagctggtgagctctagcaatcagcttcaagttattggtatggttaaattgctcagatatgtcctacaaaagcaatatgcataagcaataaaaaaaagcaatggtgacagatgaaaacaatcaagcttgatacataacaaacaggactacctggccaaaggtatatccagcacctctaggagagatgccccaaccacagcgatcatctggatcagaccatagaagatcacacatgggtccctcgtgaggaacttcttgtacacgatcaaaattacgtatgttatccagggtttcaatagatggtgacaacccaccatgaagacaaaatatttcagattcaacctatgaaagtaaacatatcacactttagcaacactcagttattgaaaactagaaatccagtgaaatatgagcactgcaattgatggagaagaatatcatgaagcttaatcaaaaagaagagacacaattaaactagacaaagctcaaaagaagcatattgaattcagagtaccaagaacaaaatgcacatggaactagacaaggtcattaaattgagatcctacttaggattgggaagggctaaagatcataaatcatggcacattagcaaggatcataagatcatacaaaattcataatatatgtgtgagagcatataaattcatatttttgttattaaaaattattaatgtttcaatttacttttatattgatagtaattataaaaatataagatgctgaaggagatggaacataaaatttcagtctgaagatcctcaagtatttattttaaatataaaaaaacccatttcttaggtttcagaaacaaaaacaatgctagcttcttcagacagccatgggttccacatagcaggcagagcacaaatagatcacaaggatgctctagaacacgaacagaccaaagaacttcaaaagaaagctccaaaacagatcaaataacagataggactagatgggtttgaacaagattgaaaagttagaagaattggattgaattgatgtcacatgagatgaagcttcaaggttttttttctttccaaaattggtcacaaccagaccaagaatctcagttggcaacattcaatttttcattcaccaggtcatctgaaatggttcccaatcagggggaaatagggtttttgaaagacagtggggtcatctgctccaacagatcccacaatccagcacagtgataccacccaattccaccatggtctaatcttaaatgcaagccaacatactaaggttgcccaggatcattgaatcgaacaaactaccttggaactgagaacaatgaccatctaacaaaatatcccagtcctttccaaaattatgtaatagtatactaaccaatgctgtcaacggaaagtagtcaaacaaatcagtaaagatcttccaaacattagcactaccatacctgcaaatgaaataaaaatattcaccaatataggattgcacaacttcaagaatgaaagttataaaaagaaggattaaaatgagaaaaaaaagattagcaaaataatatgaattccagatcaactttcggtacaaaatttaatttggaatcattttgcaattttataattgcttatcctcagccatggacttagcaggtacttacttccgcaggcactcatcataaaacccataaacttgagtaatctgcaacagacaggtaagaacagccattatcattcaaagctaaagcatacaaaacaactgaacaaacaattaagtcaatgctgtaatcagtgctatattaagttgctttaaaagtaagaagttctaactccaactactttatcaaatccatggtatcattttttaatacaagcatatttggttcccaaaatactacataatttctttcatctggatgtgtgaaagcatttgattggcagcattgcagcaatatgaacttatgggtagtatattgataagaaaaaatctgtcaaaaacaactgatactgacaagtgaccatgcctccaatcaccaaaataggattttaaatctaatctataattcactactaacaggaagatcacatgatttaaaaaagaacaaacctggcgactttcatgatttcccctcagaatagtgatacgctgacgataacgcactttaagggcaaccaaaagctgcattatgacttaattagcacccaaaatgttatcaaacaaataccatatggaagcaaaatatacaccatctaaactacgcaattaaaaaatagcaatatcaacatgtacctcaaaatcagtttgaatgtcatacacatctctgcatgttaatatttatttattttgctcagcaatgtttacttatatgtcagtgtgttacattggtatcccacttatactacagacataatgcattatttacacatacaacataatcatggtacttttttttattttggatagcacaatgcacaaccacgaaaagtttaatagtggcacccaataattccaataaacccccatacacatggcatatagcatgaatagtaatgaatcattctcattgtaggagtatgacacaaagaaaggaatattagaattatggtccagaaaacagaaatttttaggtaaaaaactactgctgataaaccaagtaattttctaatcctctaagcagatatcaaattactgattaaaaaaaaatacaattcaagcttggtcaattagtctaagacctataagatttcagtagaacatcctaaccaaataatcccataacatcttataaaaaataaataacaataaaaatatgtcagaacgaagttgaattctaaaaaaacaataaatatttaccgtaacagtttcaacagaataatagccacgatcaacataatctcccataaacaagtaatttgtatctggacactaccaacaaaaatggtaacaagaatcagtatttaacaaagaggttccatatttcaactaaaagcaaaaaaaagtatttaaatatgcaagggtgagatgctaaaaaataatggttcaaccgagaataaaataagcacatagcacatttgatctcaaatttgaaataagagaatgagagactgagtatgcaactcattggcaataacactgcagcttgtttctcaataaaaaattagactttctgctatgaaataagaaataggccaaacctaatttcgcaatacaacactaaggagcatggaatttcctgattttccaagtactacatatttcataattataaaatctatgtagtcaatgtgtcacaaaattaataaatgcatgttgaatgtaaaaccaactatcataaagaataccttccctccaatgcgaaaaagctctgcaagatcatggaattgcccatgaatatcaccacaaattgtaacaggacttttcacaggctgcaattattggcaaatgaaataatctctttagttttttcagtcattcaaaatcatcatgagttaaagctaaaagccctacaaataaacatattaaacaaagtaaaaaccaatataaatggtggataataagacctccttaacagataatggtcacaaattgagaggaaaaaggggcttgatgcaaacaatgttggtgacatatgaaccaattttaaaaaaaatccctacacctagcacaaatataaacatgctaacataaatgataaaaaatagacagactcacctggacattgctctcttccatcaaaatctcttttgccttatcacacaagacccttacctgtacacacaagtgcaaagtgaaatcagagttggatcgctaaatcaaaaaaatcacaacactatctcaatggcaaggctatttccagaaagaagacattcttttctgttgcggccaagtgccatgacacaatgtcacaataatcacacactattgacaactatggtttgggcttttaagtgttaattagaaaccaggaaaatacatcaaaagaacactgaattgtgaatcgagggtgggaatgctgggtttttattttttactttaatggatgtagagattcaatgttttcaaccctaaatccctctgatttagcaaagagtttaaactgtaaaaaaaaaaaaaatccctaaaaatcaatggccataataagaagggaagagaaaaacaaggattcctcctgttcagagttgtgacttctaataggtgtgattttttctgtgaaaggccgctacctcagccgtgatctgtgagaaacaaaaaacacaaaacaacagagcattaaagtggtcataggatcctctgccccacatcaccacaaaagcagcacaggttgccacaagtaacttactctgctaaaaaagaaaattgatctgaacccgcaaaaacctaggtagaactttcctctaactccctgaatcccaccgatcaaatatgatggcacgtgcaaataacaaaaaaaagcaaaactaattggaaatgtttaacttgattaatacaaatgctttacaagatactcagtaggagaaagtagcaaggaattcttactcatttaattattaattattaacaagtccattcaaggatccagcagtttttaatacttcccttcagctttgctgactccttccgtgttcaaaggagacaaaataaatgtgtcattaaataactgctgtttcgtaagtaccaaaataagacaaacgtcatgcaacgtatgtaatgtcagagctgtatccctgactctagaccgaaaactatgcctaaatttcttcaaaaaccaatgcaatcaactagggacaaaaatgaaaactaacccttccttaagcaataagcatagactcataactcataaacaacaatccgtggatcaacaaacttagagcaaatccaactatcctaactttttgtgacgaaaataatacaaacaaattgtgtattttctacttcttaggagctcaagtagcaaatcatagctcctaacttgcatcaacatttccactattacacccaaaaaactaaactctgccttaagtaaagttgcaagagtacgcttaagttaagcggaagtatccaaaatccagagtatttacagccctccctaataagacaggtaaaaagttatcgtataaaaaattaacgtacactcaagcatagagaaagaaatatattcttcctcctcaaataattctcagtcaatgttaacaatctaaaatatccacaccttaaatgaagaaaaacaccattaattgcgaccaattgatttaggtctaaaactgaaaaaccacaataacatgatataatcaaaatcaatgtaaaataattataaaaaaaaaactagaatcgctaccacgaattctgcaaatctaacggaatattcgaacaaacgcgcattccagtcgccattccaattccgagagaaaccagatttaacacaaagaggaaccgattcaattttcgctacaacaagccacggatcgatgcacgagaagcaattggagcaaaaagcacaaaactgatgacaaataacaagagattttcccgatccgcgcatcgcatttcataataacgaaagaaataaaacggagcgagatgaagcggtttcgggaataacgttacctcttgctcggacaagggtttgcactgcatgagctgagaaatctgctcatcgaggtttccatgcgaattcggaggcaccgaatccatgttctattactccacctcctgaccttgttcgttgaggtcgttctatcaatatcctctctccaaatcgatggaaaccctagatctcactcggaaaacccctttcgccttttcggtttgtgtttattgtttctggtttttagagagagagagaggagaaggatggtggtggtgaagaaaccaaagcgttttggaggcttcgttttgttcgataaccactcctttttcgggggcaaaattgaaattaccaataattgaaacgctcatgctcaacaacaatattgggactcggtgggtgtattgaggtttggattttaaaaattgttaagttcttttaaaatgtaactttaggggcagttcttttatattttatatgtataataaataatttaaattatgatgtaagttattcttttactattaacatttaaaaaaaattatgaaagataaattgaaatagacaaacaaaagatcaaatatacatagaaggatgagacgaggataacttaaaatagttgaaaattgagatagaattattgttaacatatgaaatacacaaaaaaatattaaaaatctatgtgagagtgaaactaataagaaaatttatctttgagtttatattctaaattataatatcaaagtatattattaaataattttttattttaatgggaaaatatcaccgagaacacttaaaaaaatgtaaatttatattttaaaatttaaaatgaatttgtaaatttatatcgaaagcttaagtcacacaagattttagtaaaaataaaaaagagtttttactattattaagttatttacataagacgaagatatagaaaagtgaactcgtaatatttaccttgtttttagaaagctaaatgtcagtattttttttgtccattaaatttcaaaactcttattttcatcatctatatttttaaaaaatatcattttaattatatcatttgttttctgtcaatgttagtgttctgttaagattgtcagaattttaaattttgaaataattaatttaaaataataactaataaacgttatcatctttattttattttaaaaaacactaaaattgtcatctcttccaacttagatgtccaaatcgaaatccaccatcaggtgttccgccatcaccatcagcttatgcacaagcaaaaagttagtttttgaaagaattaatacgacaaagtttttacaaattaacttatatataagttaattttaacttttgaagaaattaattttattttgttcttctcctatatgagtacttttggaaagctccattagtatgagttgtgagacatgaattgctaatacaataattcaatcacttgatacgcgcttcagtgtttttccattttcttattatcctttctccctctcccttgaaaagcctaacataagtctttcattggacctaaaataattttctggccctgctcccatgcctaaagcgagtttgtatgttgctaagacaacaatcacacgtggttgtgtcaatgtcctcattaaagtacatcttacccatttcctattcaactcgttatcacaaacattaacttgttgtcacacggagagacctcatcattccttcatgattaactattacgaaagaggcaccccaccatcgaagcatcctaaatgctccaacaaggcttctgcaagcagcttgctcaacaccaaaaaaagagagtagataagtaccctttttttaatcagcaagtagactagtacccatgtactagttttgacctacaaatccctagttctctaagcaccaaaaacaataagacagctatctcccacttagcaagccatatcaaaactcaaactgccaacacacatatatgcaagcaggaaacgtccaattatgcacaccagcgagaagtttgacacagaagaggcaagcaagaatgcaagacaaacaagtttagactataaatgagatgatttggattttgagattgaggtaaatgatgaggttttgacagccaaaaaagttgtctgaaattataccattgaatgtaaatcttgtctatcaactacacaagtttttcccttgcctggagtggcaataataatttatatcttatatggaagctaaaacaaccaattatataaaactactcaatgaataatgcctctgcaacttgaatgcacatccactgcttgattaatagtgtggaagagcctggttaaacaaaattccaatctccttgcggatataaagatcgattttaatttaatgaccgtgagatatatgaacaatttccctatctgcagccttgaggggttacctaccaacagccattctattcaatccatctggtagccaggaatcaggatacatctgcataacaagattgttgtgaggcttaccttaattttgcttcataacacgattaacaaaaataccaaaaggccaagtaagataaaaggttaaaaacagcatcatagaaatccacattaccaccattacccatgcaacagtccaccagtcatacatagacactagtagtatatttgtctcttaaatcagaacactgccctattcttaataagaaaaggaaaggatccaaaatcaggacccatgatttcacatttgttcaaacaaattcacattggcctctactccattttctatcataagcccaaatatgaaactgcaactcctagaagtgaaaatggaaatcccattttgatctattttagaaagcaacattagaataaggatatattaagcatcaattggagatgtatctgtcatgcactctttgcttttaccaaagcattaagagtttgtaatgctaacaaactgacagtttttaagtctttgagaatataccatccactcttctgtattaataagtcctagccttccttatgactaacaatttagtcagcttggaaaaagtatagtcgcaataaagtacctctatgctggagttttactggcaaaactcatatcataattgtacatagtacatactctaaaaactaagcatactgtattgaacaacaaacatggggtgtagggagcagaaagtggattatttgtttcatgtaagttgagcttaactacttctgaagtataaaattttgctcacacaaatcagacatttcagttccgataaatttattagctaccaatcaaataacaaaggaaatatcaaaaagaaagaggcaggcagtacctaagtttatgttcaccaataatccccgcaggagcatagtccatccttaaaatggtggaaccttttcgcatctcgaataatgagttctctgcctacaagcttagaaataatcttcagtgctgtatggcaatcgccacaaacacggaggttcttaattaccctcatcggagcacgagcagggctgttaaggagaccataagcaacagcaagtctctcactgtgggcaagaagagcttcttctttgccttcctgatctatgtcatgcaacacaaattttgtctccggaacatagccagcttctttcatttgtgactttaaacctctaagcagggcatatatcttatcattttcaggatgagaagtatctcctgctcgatattcacggactcgactccttacttcaagaagatttttgcttgccaaattctttttttctttctcttttgtcaagtctgaggcttttacaggtacaaggccagcctttgattgctcatttaaacgagaagaatctagctgctcaactagttcagcacaacgatcccccagcccagtattcccatgaactctacagagattcatcaaaatctcccatatatcagcacttggctccattggcatcttttcaatgaactcaaaggcttcatccagatgcccaatgctgccaatcatgtctactacactgacaaaatgagtcatagatggtacaatgctgtaatccttgctcatggactcgaagtgcagcattccctcgtcaatatctcccagcatattacatgcaaatagaactccaatgaacatctgcccatcaggtttcagtcccaagtttttaaattgagtaaatagatcaattgaatcttcggcaaacccattcttggcaagctgtgttatcatggtatcccaagtagtcaagttgcgctctggcatattgttgaaaatgttgagagcatcatctacagaaccacattctaaatacatctccaatatcctattatatgtgctgacttggagaggtgacagatgttgtgaagcatgcctgtgtacgatttttgcctcttcaagagatttattctctgcacattggtgcattaattgcaaatatcggggcaaatccacaggaatatttagtttttccaacaattccaaaacttcaactgcttccttcacgttaccctcaatgcagaaattatctaattcctcaagtgtacctctatatggactatcattagatgcattgtctgattcgccatcatgatttgcgttatttgatagatgagagccaaccactgatctttgtgcaatattcaagtttggcaaataccgaccatcttttagactctgctgaaactgtccagaacctgggtactgttgatgcatttcatgactccctttgtaatgagcattttgtggctgctgaaaatgatcaatgttttgatttatgtcccctctaagatttccctgtgactctaaatgcctaggtgaactatatgtgttgggagattgcatcctttgtccaggttcgtgtgtccaaccatgtttctcaaccaagggatttgcatgcatcccagagccccatgcattatcaacacctgccctaactttttgttgcattttcatgttgccttgactaaagtacccattgacacttccattatgacccaccaaactattgtgaacgtttcgggtcacatttataggacctccgtctgcaatctgaccagctccataagaattttgctctgcatttgctcgggaaacataatcaggtctttgcttattcaacagctcattagactcaaccttatttcggctttcctgataaaacccaacacgattttgctggtaacctgaagaatcatcattttgataaccaccagaaaactgtaaatctgtcctttcagcagcagtgctaacagcactcaatgtactaaggcctttgggtgagcaacatcctttgcacaacttcaaaagagaactaactgtaactgatgaggctctctttgaatacattatttgggacttaacataatctgaggaaagacaaattggaaataaaataaaatcagtgaaaatgtaagacattggaggggaggatatcaactgaaacaacaattttggacaaaagattattctgaacagatgaaagtcagaaaggggtttaaatttaacaaataaaagaaaagcaatgttcacactgaatgcaaattgatgtttgtgattattaaaccaggagatcagagttgttccaaaaatttctctacaagtctatctctctaaatttatccccctaagatgtagcaaaataaattttctatttcacagaatgatgccacagaaagcttctaggactacactagcacaacaaattcattaccaaaaagtctaagttgactaaagaacaaagtactaaaaacttagcagataccaagttctatcatattatattcttatcaacaatagaatggtacagatacagatacagagcactcacaaatcacaataaaggagcaactgagagacgagaggaagagtgctctgttcgcgtcttcgtgaggatgtcgtagaatcagaaaacgactcgcgtaatcgcgttagggcaaaaaatttggattaagtcacttttgggtcaaactgggtcgcccaacccgatccggaaagcccaactctcaaacttgactgttgcttcctgcacctccgtagatttttaaaatttacccctttccaaaaaataccccgtatagagcttttaagttttaactttattttttattatatgagttctggatcgtgtgcttgcttttccagaacacgttttaattttattatgacgaaaaatatattaatcattttataaaaataaattttaaacattttcatatttataaaacatatatattttaatcttactaaaaaactagaatatgatgttttaatgtttgggttgggactgttgattttggttgccaataatgagaatgagattgatgcagctttgggccttgactcaggggacggcgtgatccagaaattctcattaatttattttatcctctttttgtttgtttgtctttccaacataatatgcacatgtcaaatttaatcatcacaatatcctattaaatttcaatattatctagtcttattatatatttattatttattttaattatttgttcagaaagaaaattgattatttatgatttaactttaaataggtcacgtgcaatttaataaataaataaattttctatagtgatagactccacaaaaatcttgaaacgaaatatacatataatttgcacattttcaagtgataaattaattacatgtgatatcaaaaaattaagtaacatgtaaatatatatttagaacaaaatgaatacacacatcctcatattaataagaaaaaaatgttataatgtatcaaatttaatgtaataaaaatactttataaaaatagaaatgaagacactggctgttagtgttatgtgtttccactggttatattatactcaattagaaaataattacttatgttatattaatagacaaatccattttacgaaaaattcttgtaaaaaataaaaattataaaattttgtgtttggttcattaattaataataaaaatattattatttattaatttttagacataactcttaatttaatagatagtaaaataggatatttattctaaatagtattttttattcattaattaagatagtctatttgaaacataaaccaataataaactaataaactttaaaatgcagagaagaaaaaaatggtagataaagaaataaacaatttgttaaaaagagagtggtacatgaagtgatggtagaagagtgaaaggttaatatttgaatacaattcgctaacttccgtgtgagagaatgagaagaactgagagaaaagattttccaaagtagaaaaaaaaattgttttggatttgcataacttttatttatttattaaggaggacataatagtttttttttattacttgttatagatttcaaaactgaaattgatttcttaaaaaagttgcaattgattttaaaactacccattttaattttgtttttaaaactgattcattaaaataaataaaaactgaaattttgattttaaaatcaaaacttgtttcgttaaaaaaaaaattaaaactaaccattttaattttgatattaaaatttaaattgattcgttgaaaaaataaactgatttaagaaaatttgaaaacaattttttaaaatttgtaaaacaaaaaagaataggagaaaataaaaagtttagtaggaatgaaatatataaaaaaagatagtccataatagaaaaatgcaaaagttaaacacactatgtattaatcttaaaaaaaacactattaaccaacaaaaataaaaaaataacaatcacaatttttaagaaatgaaaaataaaagaaaagtatttttcttgcgctatatatacaatgaaatttaattgtgtatacaaataaactaatacatcttaacaattttagttattgttggatgtgataatatatctaatgctttggtggatgaaatttttaatctttatcaatcattttcttttcactccattgtatgatgattttaaaactcaagaacaataatcaagttacaatatatgataataaatcgagacatgtaacaggtaattaatttaattagacacaaaaaactagtattttgatgaagtatgaaaggcatagcagttaagcaacaagagttgcagtaacagtatgtaatatggaagttgttctcttgcatttagacatgaatagtaatttgaagtgggataaaatttaaaatgtgaaattctcgtcattaacttctttctatataaaaaaaaaaaccttcacaaatgtatacaacataaaaatagttgtgaaggatcttggagagtaatcccacatcaatcaaatccttgaattactgttaataaataaaaatactaaaatgttatactttatgtaaatacagacaccaaataaatattaagtaattgttattataaaataataaataaacacacctcaaattagtgacaacaaatttattgacttcaaataataaaaattataaagctaccattatatatcctattacactgacataaaaaataggaaaataaatgtggataccaaactatctgatttcctttatagttatagacaattgaatgatagtaataatgttaaattttattttttctacactgttagtttatatattattttgaatttgaagttttgagaagagagagaaaaacactacaaaagagagaaaagatatttttgttgtttctaacctttgaaggcgcttctcctctctttctctttctgcaaccaaaccaaaaattaggttttctcgatcttcttcatttgtcactgctctcaccgtttcagggttttaccttcccaacacgacccaggtgcatccatggctcttctctctctctgcaatctgcatgcctctattattattgctatcattctttcctcgttgcttcggctatggtgtttttcttttcacgttttggttgttttcgtgcttgtctttcaaagacattgtgtttggttcgccattttgcttatgctatagtctatttgagatttcgaggagaatgaacttcgttttatgcatccatttttttgttcttctcatttgtttagtttgtgcttttgcatttttgagactttgtcgattgtatttgatgtgttctgctgatcggcttctgctttatgtgatatcgtgatgtaaatatgtttgcaacggttattgatcggaattcgttgctttgcagggctggttctgagcaattttgttcgttttaaagagtatttatctgtttcagcagttttttttgttttatttttttaattgggggcgacttgtagaggtgttatcccgatcctggaaaggaggggttttccctttgaattttgcggacaactgttgactacgagaattgttattgactatgcgaacttcatgggctgatttggctgcaaattctgcagctgaaaacgcaggtcctggttcttctgctaataatgttggaactggtagcactttagctcctacgcgacctgtttatgtacctccccatctgaggaaccgtcagccagcaggagaatcccctgcccctgctccagcatatagtgtcccttcctctggtgctggctctagttctggtgctggtaattctggataccgttataatgcgcccagaaatgattatcgtcctgggtatggtggtggtggtggacgcacaggtggatggggaaacaaaagtggtggttgggatcgtggcagggaacgggaagtcaatccctttgaagaagaggataatgctgaagaggcattcagtgagcaggagaatacaggaataaattttgatgcatatgaagacattccagtggagaccagtggtgataatgtgcccccacctgtgaatacgtttgcagagattgatttgggtgaagcacttaatcagaacataagaaggtgcaaatatgtgaagccaacacctgttcagcggcatgctataccaatatccctagctggacgggatttgatggcttgtgcccagactggttctggaaagactgctgcattctgtttcccgattatcagtggaatcatgaggggccaacctgtgcagaggccacctcgtggggtgcgtacagggtatccgcttgcgcttgttctttctccaacgagggagttatcaatgcaagtgagttagttagatttaccttgtattatgctatgattttaattggacactgttctgcaatgaaaatatatttgtaatgttctaatttggtttcagatacatgaagaggctaggaagttttcataccaaactggggttagggtggttgttgcatatggtggagcaccaataaaccagcaggtttttgtcccttttatctttgtttctctttatttcatactttgtttctcccacaactagttctgagtctatgacattatattcttgatagatgtttcaattattatagctctttctctctctggtgtgtagacaccttgtttcaaattacctagcaaagttgttctatttgagatccaagtttggtaattatggttgtcaaatagggatttgaatcatgaatcagaagactcgttttccgacctgtataattaattgtaagattcatgataaataattagaaatgttttatatagttaacaaagtcataaaactgaaaaacagatttattagcattttgacgcagagaaaataataaacacacacacacacacacacacacacatatataggcatctaaagtaaaaaagaaaaactcactataaaccatagttcaacgcataacagtcaaaagaaagcgagggtatgcaagggacacttacacagtggctttacataacaacctcattatttgttgtactcatttttcagttttcaccctttcagcacaaatagccagaggacacatcacaatgtccatgttagtccacatgcaaggaacaacaacaaaatatagatataacagcagcaattatgaccttgaatgatcaatgcaagcagcatgaaaacactagggaacacatcatatgtgaagcatgagttgtgtgggtagtcagagagtggagaaaaaaaaaaataatgtgtatgtacatgtttggaagcatatatagtctcatggtttcatagtgagccatggtgtgaaattttgttacatccattttgagcttcagtactgtttggattttcatgatttcaatcttccaataatgttgcaattctgtacttgagaagtttttgcatatgtctgtgtggatattggttggtcaagaattttgtggttatatattgtagtacatttgctggaggtgctgcaccttgtaattaatgagtctcaaacttatcactgtagatgtattctcctgtagattctatcctgttgcaaattttacttaacaggtccaatatggaatctaaattgacccatcaaattttaccgttaaatgatagtaagaaattttaggttttggtatatacccttaccctaacaagttatattttctctagatgcgggatcttgaaagaggggtggacattcttgttgcaactcctggaagactggtagatttgctggagagagctagagtttcactgcagatgattcgatatctggctttagatgaggcagatcggatgctggatatgggttttgagccgcaaataaggaagattgtagagcaaatggacatgcctccaccaggtgccagacagactatgttgttcagtgcaacatttccaaaagagatacaggtctgatatagtctgtaaaatatgctttcatgttaagcatgcttttatctggcatgttgtttttaataagaatgtgtttcttaattttgctacctttcctacttcatggggcagtttggcttgcttccccctcctcctttgttgccccattatctctagggcctgcatatattatggactccttttagtgctggttggaagtctatctcaggaagatgtgttttactttatagtgtaggttgtcattgctctgaaatgcattttccttgttatttgtgaatcacatacttgtatctaaggggtcttgctgttaatctccctcctcttctatttcagaaagagtgcctttagaataatgtaatttggttgcttttaatttgatttgagatgataagtggcttcagaggtataaacaaacaatgcatgaatgcctaattgttgtgtatattataattataacttttaagacctcttatgatttctggttgatatgcagagattggcttctgatttcctttcaaattatattttccttgctgttggaagggtgggttcaagtactgatttaattgtccaaagagttgagtatgttcaagagtctgacaagagaagtcacctaatggaccttcttcatgcacagagggcaaatggtgtacaaggaaaggtactttatttacatagaacttattacaagtgatttttagagactaaatgaatgtcatgaattgattcaagttgtgttaatgcatagatgatttggttggaaaaaaatgccagaacaactaaaatgatcatatacctatgtcacaaatgaatttggagcttttctttgttgtccagtgtcacatttccaaaagaaatacccgagatttttacaatgactattgtctcattaactattctgacccacttgggatgggtagttctcagtgatgcctatactcttctactcgtgcatgcatattgttaaaagaattaagatgagtagaagatgtatgctataacagatatgaagataagagatcctccttgagaaaacaaaattacaagagaaaaaaaaaaacaagagagcacataaaaacatacaaagttactgacccagtctctttaacattcctctaaaatggccacgagctttatgttatcagcaagtagaagccaaaacaccttatcttgtccccaaagaatttgatcattcatagaattctccttatagatacaagaattacattctgactgtataccccaaagtgtagcatagatggcttattgccaaaaaatttagcttctttacctctaccaaaaccaacaaaactagcagtataaaaatccaaacttttttttgtaaagaaatatctaccggacagtctaaactgattctgagcaacatgcatgcacatgtttggattatggtgttttaattattttgagctctgtcaggtaatgcctttgcaaagttgcatttgaatttcagtttgtatgggggatttatagtgtggataatctattttactcatgttgtgcttcattaagagtaaaacctcgctaaattgtggtaagattatttcattcatgatttttttttttttttgcagctagttttgactttagtttttgtggagacaaagaagggagctgattcgctggaacactggttgtgtcttaatggttttcctgcaactactattcatggtgacaggtcacagcaggttagtctattgcatgaatgttaaaagtaaacagctcttgtaatgggttgtcacacgtctatgatgattggtgtataacataagattgctttagtgctgtgaaaaattgtgcgtgttattgttaaaaatgaaattaaaagtatgaaaaattaaattaaaaatatgaaacgtttaactgaatccccaattccccttttttgccacatttcactttcccatattgctattgacttttgtttatagtcacaattgtttgccatttgaaatgaaacgcatgttccctgaatgagtatgaactctttctttaataattcctttcactctcacaactgcaatctctcaaaccgatgcctttggtttaaccaattctgcacaaattaagatttgtaatctcacttagaaaaagagctaatatatctgacaaaaacgaaattctcattaaaaatgtaacccacggacagtagttatagtatgccaagaaaagagcatgtcttaggcctcttagagcatttgtatttgtgctctccatggtatgttcttaagtggctcctccctcatttaaccaccagttgctaaaatttgagggataaaaagtgtctttaaagtagttattcattttagcaaccaatcaataaatttttaagcaacagaaaaaaagacgcccttagcataatagtggagaaggaaaactatatatctaaattctaaaaacatctaggaagaatatccaacctgactgtctcatattaacagagaagcaagagaaaatgagaaatcagaacagagaagagaaaagattagaatgtgtgaagttacttttacctgaacagaggacaagaaatctccatagctaataaagtgggttgaacattttatttgggttttatttagagatgacttgatacaccaaatagacgggttgcaccattgcattaatggaagaaactattttgttatgtttcttctgcaattttattgaattccaattttctgtctactgcattcccgtgactctaatacaaaacacagaatcttgagccttgcaagattcgcaagtcaaacatttcaagactagaagtctagaacagctatcaagtggttattcctataaaagaattgtttttggttacaggcaatattattaggtttaaaatgattctgttatattctacatccttttttggggcacatcttttgcagtcattctctgatattattaccctattatttgtttgttcaaacctggagctttcaaatattcttatgtattttttatttttcccgggttttttcattaatagggtcatggtcctggattcttgcatcattttgctttgtagttagtgttaggaaattgctattcaacttgctaccctcatattaaacccttttacttcatagcatttactaacttttctgttggttttgaattgcaacaatattattggttaagtatatacttgttagtcttgctgtgctcatcaattctgaaatacctgcaggaaagagaatcagccttgaggtcatttaaaagtggcaacacccccatattggttgccaccgatgttgctgcacgtggtcttgatattccccatgttgctcatgtggtcaactttgacctgcccaatgacattgatgattatgtacaccgaattggaagaactggacgagctggaaagaaaggtcttgcaactgcattcttcagtgataacaattcatcgctagctagagctttatcagaactgatgcaagaagcaaatcaagaagtacctgcttggctctcacggtttgctgctcgatcttctttcagtggaggcaggaaccgccgatcaggcggtcgatttggtggtcgtgacttccgaagagagggctctttcagtagaggttcctcagattactacagtgcgggaaacggcagtggtggtggatatggaggctcgggtgggtatgctggtggagggtatggtcctggggtcactagtgcttgggattgactttcttcttttcatagcattacataccatcttaggtataggcgtggatacgcctacgggatggttttactccccccgtgtttttatgatcttcaatttactcgtgtttcaagccatcatcattttgtactattttacagtgctaatcattgtggggaatgggtttgtgtatgtggtctagtagccacatcaataaaggttgtgtaatgatggtgggtattggtgattactagcatattaggagtttcttgtcgacaactttttatacccttcattttgggtggtaattttggtgggagactggtgggagattgtgcaaggggagagaaatcgagctttttgttattgccgatcgtggttatctgacttatctctctcaaagcatgctctttccagtgtcaaccaatttatgttggaatttaatattttcccactttggcaaaggtttttgtaatattatagcggtggttgaaatgaacaacaggttcccgccgatgatttcaattgaacatacactagtatggtaacatgttcattatctttgaatactatatttagggagagatgaacatagaccaatggcaaaggttatcttattacattgcacaacagagcgtgtgccacattatcaaacactgtttactcatattttcccttttcttaattaaacgagtttagaagagagaatgcctgcctttattttagtatgttctctacgtgaatttgtggtaatttgtatgtgtgcacagccagattttgctttttatatttctaagtaaacttcgctcccaatggtttcccagttttatcattcatcataggtgatgctcgtaatttttctatatacataacaaatgaaacaaataatagaggttcttctccctccagtttgacatagtggattattatattgattttaggtgttcggccaaccattttatttgtatttcaaaggctacatttatgataaagttagattagttttgtcttgtctattcaaagatagcttgaggtcgttaaagaagtggaccgaccatggactctcaagttgatgatcaagtcaataattccgattaaaatagaaagatactcgagtggagaaaaattacgtatagcacgggacccttatttatggacgtgtggatgggatttactatttaagacccataattgtcttcataagtagaaagttctattctaatctaagtcgactaatgtaggacttgtcttccttattaaaccttagacgtgggaaagaaagaaaaaaaaaagagtacatagagaattctatcccatttttaatatacatcccttattcctagtaattttatggtaacattatagttttgatgttattaaatcattattttactttttataaaaactgaatagggataacaagaataactttgggggaaacatagatgctaccatgatatttactatttatataactttttaaagtgatatttaaattcaacccactccctcaattaggggtgttcattaaattgagttgacctaacaattcaatctgaatatatatatgtaattgattttttttcttaagttcgactttatttgaatgaattaaattagttcaattcttagatttatattttttaaaactggattaacccgaattaaatcaacctttttattatgtgtgtaattaattatcttggttcatttttttaagcaatcggatctaatttgaactaaatcaattaaatttgatctctattgattcaattcttaaatttatatttttcaagtttaaattaacctaacttaaatagactgttatttttttgggtgaaaatgggggtttgagattacaaatatcttttaagatcattataaaagataaaaactttctaagtatttagtgcaaatttatattcagaactaaaacctaaaactatttatcaaactaaattagttcaatgtcatttagtccatgcacttatagtaaactacaattaaaaatctaaattcagaaaaaatttggacacttttatcatttttataataatttgtgtatttattagatctataatttttcatttttatttaatattttgaaaaatatgttattaacttcataatctgaatatatctaatttattctttcttaggttagttctgtttgagtttatcattttttttctactgattaattttaagaatttaatcaaaatgactttggtaatataatatattttacattatcatccaattataaattaacatatatgatgaatttattaattttagaataattatttctaacctattaacataataaaattactcatagtgcatgaaagttagattctcttaatttgaaaattaaactgttaatttcaactagtaattcaaatctttttcctccaaaactcgatcatcggaactcgcaaacaatgcaaacaccaaactggccgtgagttaaaagaaaagaaaaatgttaaaagccaaaatgtgttaaagaaaaagacaaaaaagctgttcggacttcgaagtagccatgtgatggccaatcttcacaatcccacaaaaggatgatattttctgcgatcaataaatcaaaaaaagaaaaccctctctctctccctctccctcctttgccttcaaagttgggttggtttgacccatgaactgcaactcatttattaaagaggaccatcgtcacaagcgaatgaagcgatgtgtcctcttatgacagttatacaatttatattaaaattccgcaaattcacacaactcagtttaacattaaaataaaattaaaaaaaccactttaattaatttttcgcaaatccccaagagagaaaaaaaaatcacacaatttttgtgaagctaaagcttgtggtttctttctcattctcaaccaaaggtgaaagaagagagtgagagaaggtgctcctcatctcaccgctcttaaagtcttagttcttcttccttccttcaaaactcgaatgacccttttctttgtttttcgttctcttgcagttcctgaggtaaagatacaagcttttctcttctgctcactggatcgggttccaggaattgaagggtaggttcaataggagttgtgttgatctgcaccaagatgcttaatttgcgttgaaaaatccattcatttgcaagactcggcttcggaaatgaaccagttagttgaaagctcaacgaatactcaaagggtatctagagttcaagctccactggtaaaaagtccaattcactccaattttttatctgcatattagttttcttcttttgaatagtatgactttttctccatttttcagttgcagcttcttcttttttcttttttcttttttgtgtggataaaaggttcgattggccagcgctgtgcttgaggttttggttaacttgagttcctatcattctctgcttgtgtttggaagagaggcggagaactaagttgtaacttcagtcaattgggtagtctatgaaccttagagttcttaaatgggaagaagctctcgtttatttctagggctcttcagtcaaaattagatcttagaagtctcttgctgcctcaacatgcattgtgtgttgactttcctaaattctaatcctacctaaacatgatgttctagactatagagtttcacgcagctaacatttatggagtgccaacctccatcgtccttacttcacacctttgactgagaatgctaccattctctttgttttttggcacctaaaaggctaaattcttaggggtttgaggggttgctccattccaaggttgcatatcactagttcatcagcaggaatgaacccaagacctttttgttgatgcaattcggtcttgctaattacgagttgtacttagctagtgttttacatatggggaatgttaacctccatactccacacccttgacagagaatgttaccaaccaggaggattttatatgtttgccttctcgggtatgtattgggtttgaggcttaagcatgtgtaggtaccaacaagggagtttaggacatttttgtttaggggggaggggggtggaatacttttctttaacttctctaatggatgtgctgagaaagtggaaatctgttttgggctaatgttcccctcttgttttatttttttggctagctagattttcatccttcttctatctacttccatttcttgccatataattttttcatggaatatttttataagaattttccagctgctgtaaacatagtatttacaagtataatcttagtacatagctgcaatgctcatttatatctagcctttgttctttgttttcatttagctatttgatcaaagagtgagcttagttttttattgtcaccttcatatagcatagagatttacttttttcatttttccttttacattgttccccatgattttccatcgaaagctatcaggttatatttgtacatatataagataaattaaattcatcttggtttatatgtcaacctttttttccctgagcatattattcctgcaaattcttctgctcatcaatatcactagctctaccttaagctatttgtcttataataatgggtgttgaaaatgatcagttatcataactcttgtatagagttattcttatctactctccgtcctcatatgtttcccaagattttctgtatttctcctttattgtagttcactaattttttggctacctgatatttcattttcttttgtctcaattaaaaaattcatctgatggtagtatctccatcaagcctgtttaatgaatcatctcaccttatcacatccttttatgatccttcaaatttactgcttgtcactaccttccctcattctggaagtgtaacttacatgatatgtattacaaatgcaggatgtagttactgaaaaggcctttcttatgtggccaaaggggagtttttcattgatttcatttttttaacttgagattattttaagagtaactatttttataaattcactttcaaactcttataagatgtctctctggtgatacccagatgctccttgttttctcttgaaaattctcttatttgtatttgtattttatgtggataataatggtacgcctaacacctttatttaagcctcacaagcagtaataaagtgatttatttgatcttgttttctgtttttatgttactctgaccgagcatcatttgcatgtattttaattccaatatattgcagatatcccttattttttactttttaaaatttgaggatattagacctaagggtttgaatagaaacattttagcagaagctgaggatagctgaagtgttatggcatttgttcaacattttcatcatgaagtcatagttttaaatagtgggtagcgggtagtggtcggtagcggccgaccccaaaaacgctatagcggtaaagccactactgtgaagtccatacttataataaattatccctttgaggcttttttcggggttcaagaagcaaaataggggatgttggaagtaaaagcctaagtctgttttacatttcatgggccgagggcccaataaaaagtgctggaaaaaaaattgctccataacgcataatcctcacatggcttccaagttccaacgtaccacaactagtcagtggaatcaaccaatagaaagcaagcaattagatttcacgatccgtgtctccagtcccaaattgcatctcagccgcttattcaaatttagaaaacacagttcaaagcatcaggagccgtgcgatttcgcggagcgggagaaggagctgagagagagaacgggaagcgcgacggtgccgaagatcttcttcggcgagaggctgttcggaggcttggtggagctgaacgcgctgaggaaggacggcagggaggagttggagaggcggctgaaggcggaggagctctgcaactcgcttctcttccatggagcggtgcgatagcgccgcaagagcttccaaccgcaccgccgccaccgaccgctaccggaaaccgtcacgttgcggcgcggaagtagcggctgggtgccgcaactcgcggttgatgcgagatagcgcgctaaagcggcgctattttaatcatagtatgtaatgaacctatctaatataaccttacttggtcttaagatcttactgccccacctgcagcattgaaaattccatggctatacaaaaattacgtaccccattacccaaaggttcctcgatatgcgaaggtaaggaggaggaatattgtactcagctgtacccttacatatgtaaagaggctgtttctggattcgaactcataatcaacaagtcaaacaatatagccattgaaaattccatgactatattcatatattataattttaaaacttaatatgactatattcatatattataattttaaaacttctcctctcaccattcttttattttaactctgtttctctcttttgccttattttcgatttatcattgggttcatctaccaccgaccccaattaatttgggttaaaggtgctgttgatgttgatgttgaatatgacctttccaagaaaataaagatttcagcttaataaaattaataatagtttattgtttgacaagtcaatagattgtgaagttattggtcttgaacttccttttattgttttcttgctgaaaaaaagcagtatagaaagtaggaactgttcaattctttggaacctgaagttggaaggagaagtatctaaagcttactgtgtgcatgtgaatatgctctcggacattatgcatatacatatttttggtgaaatctttttgatattttaatggtactttcaacttactgcattgagaattttacaggttgactctgtttcttgctactgtaaggtagattcaggcctgaaaacagttgttggggcaaggaaatttgttccaggatcgaagttatgtatccaacctgacataaacccgaatgcacataggagcaaaaactcacgtagagagaggaccagagttcagcctcctctcctgcctggtcttccggatgatcttgctattgcatgtttgattcgtgtgcctagggttgagcacagtaaactgcgtttggtttgcaagagatggtattgcctcctgtctggaaatttcttctattcactcaggagaagtcttggaatggcagaagaatgggtttatgtcatcaaaagagatcgtgatggaagaatttcattgcatgcttttgatcccatctaccaactgtggcaatcccttccacctgttcctggggaatattctgaagcattgggatttggctgtgccgttcttagtggttgccacctgtatttatttggtggaagagatccactgaagggatctatgagacgtgttattttctataatgcccgtactaataagtggcatagagcaccagacatgctgcggaaacgtcatctgtttggttcttgtgtaataaataattgtctctatgttgctggtggggagtgtgaaggaattcaaagaactcttcgatctgctgaagtttatgaccctaaccggaacaggtggagctttatctcagagatgaccacagcaatggttccctttattggtgtagttcataacggaacatggtttttgaaaggacttggatctaatcgcagtgtcatatgcgaatcctattcccaggaaactgatacctggatcccagtgagtaatggaatggtcaatggttggcgtaatcctagtatctcactgaatgggcaactctatgcacttgattgccaggatgggtgcaagctcaaagtatatgacagagcaacagattcatggaagaagttcattgatagcaagctccatttaggtagttcccgtgctcttgacgctgctgctcttgttccccttaatggaaggctttgcattatacgcaacaatatgagcatcagtctagttgatgttttgagtccaaacagacgtgtggaaagcaatcctcaactttgggaaaatattgctgggaaaggtcatgtcaggtctttagttagaaatttatggtcgactatagccggacgtggtagtttgaagagtcatattgttcattgtcaggttcttcaagcctgagatccaaactcctctgatgataatcttggctatacagttaggaaattgttggtattttgggaaaatcaaattgaaacaggtttatccactttcctgtgtgggaaagagattgtgctttcattgtaaagatgaggttaattgttgattttggctatagaatgaggtcattcctttacaattatgaatagggggcagatattgtaaatgttgtttcactcaaggctgtgccttttcctttctttacagtatattaggtttgtaagacatgcgtttccgctgtatatgatttattagaaaacatcaaaaaacttttgtatctttggtcaagttaatttattcagtaagcagggggaacagaatatcatatccccatgttgtggcaaaagtcattccaatggatggtttgaaaatcagttgcatgttttttaagagtaatagtatagtatctgcttggataatatttttctaaaagctagtgtcaaatacagatttcaaataccaacgctaatcaagtctaggagaagggattagttcgagattcttgttgggagagacgtatgcaattagtgttaaactataacttgagcaaaattacttctttacttatgatacaaatttattaaaagtaaattaagaaaaaaaggtagatgcacaactagtcttttccctgaatgtttggtggctgagaggaatacaaaaatatttagagaaactctgaactttatgaactactgaagaacttttcataaatccaaaattatatccttcactattgtattattctccattttaagaaataatcgcactttttttttttttttgcgtatgtgaagtaacaatcacactactattatttagccactgcagcaattccattcagctcaaatcactcatgcgcctctgtttatcatatcctgaaaacgtttgaatgaattttctctctcaatcttcagttgtttgcggcagttgttgacgaatgcatcagccattttgttgatgtcttctttctcattctcaaaaactatttgtctgctcattaatagcttcttcctatcgttactttcattgctgctcctcttgttggtgccactgccactgaagtcatttccatgatccattatagaagataaggtaaaacaaactctaagctcagagagagagagagagagagagattttgctgtagaatggcttcttgattcctgaaagagtgaaagttcactatttatattacaatctcagcatgtgtatagcatggccataggccagagaaaaaacacagaaagtggatagacttgaagagaatgtctttatgattgtcgtcaggcgaaaagagaacttagctttgtgagtggtacgtatttaatattactctacttgccgaggcatcatactttttgaactattgttaattcaggtaaacttgacttcaaaaaatacttcaatgggaacattgtttaattatcatggtaattggtagctttcttaaaactaaacgtgtaatttgttgtttagtaagacttttgacgtgtttaaacaggtggcccgaattgacccttggtcaagatatgtattagataatacatatatttgcctacttcttaaactttaagcagttccattgttgaaacatagctttaacgcatatgttacgtatcattcaattatctttatgttttttacttattttatttatgcatataaaaaatactccttaaaatcaaagaatacaacttttctgtgtccaatttgatgttcaagaaatgttttctaggggctaaagcctaaatgacatggaccaaggaccaaggacaaaccttccttcaactgccatgcaagttagaaacttcgaagttctaacagtgaagcaacacagaaaagaggttcatttatggaaggaagccctttttccgtttccttttcctttctctatatccttcttatttatactttttatgtatgttttcggattagtatatcatatagtattaagaatatagccaggcatgccattagactcttagtctttcgagtaacaaattttactttctttttaattataataagcatacaatattaagtattttgaatatttaaaagacacttgtggatagccgttttatagatatgtaagtttcttttccgaataacaatataagtagattacatgatggtagttagaaaaggttttatgttaaagtagaagagggaagtttgcactgaaaatatgttcggagctttttgaccaatcatggatgatggatcactttcataactataaactaaaataatatatttatatacagacatgttgatcatgtaattcattcttcttagaaaaatagaatgactttaatatacttctaatccctataatttactcttttttattttaattctttttgaaacaaagtttaaaaggtctctaaaactcgtatttttgttgtcgttagtctttgcaattactgatcaatagataatttgcatatccgtgtattacatagttactaaaactagtttgagatatttttactcgtctacaactataatacatggaatatatctaaaaaagaaaaatattaaaagtatttgaacaagataatagaaagaagagtttagtagctaacgcctaacagtgtagaaaaagaaaaggaaaatatttgttgtacacataccttgagagagataaagaaaaataagtaattgatttgatatataatataatttgataaaagagagaaagaatgaaattaaaatcgttgataaagtgtttaaaatttgtggatattgaaatataattactagtatcacagtccatcactatataaatatcacacttttgtactctacttcaattcaaaagtttcatctcaatttaaaattttcatctcatttcattttatttttcgttggaacaaagtgtagcttaagaatttcttatgtctcttgtttaccctcgacgttatccttcacgcgtaacccggaagaagaaactatagtattcgaatatctgatcatccctttctctggcttccttcttccataaggaacctctgaaatctgaatccatccattgcctatcgatgtctgcgattgcgatcttaccctttgtctgaatctttctactctacgttctaatggcagcagcttcagaattagaaccttttcaagacaacattctccattgcctctctctccattctgacccatctcttccaattccaatctctgccgtcacatatttccccaacagcacctcataccctcccaccttggactcctacatcagaaacctcagattcagattcacttcccccaccactccaaaaccatccttcatagtggcaccaacccacgtgtcccacatccacgcctccatcatcttctgcaaaagcttcagccttgatttgagatcagaatcagaagtgggggccacgattatgatgatctctcgtatgttcagaagccccatttggtattgttagttacctaacccattgatttaagggttttaggttttttttattttattcaattttggttttttatttagttttctttcgttaatttttgtttatcattttttaaaattattgttatatacgtgggttacgtaacccattggttttatttgttttatttattttgttttttataatttgtgttatttgaatttgttatattgtattttagtttttggttatttaaagaattaaaaatttgtttgtttaattatttaaaaaagcaagtcattttgaattaatgtaaattagtttaatattttgtatgtaatttttatatctttttatttaatatatctgaaattaatgttataaatactttgtattatgaatatttatttaattgtttttgtataatatgtttctaattttaaattttaaaatttaaaatttaaaatacttaaaatattttgataataatattttcttttaatatatgaaataagttatatttaatttgtttttgttaagtaatttttacaaatataattatgttaattaagcatttggaacagtaatggtaatttaattttgtaagagtagttgaaaaattaacataagatataatttgaatgacttatatttatgaaataaattgaaattaattatatttattatgtattttcatgcaaaatacgctggtccattacaccttaaataataaaatcatttcaatctaattgtatgtatcaatccatcaaagatgataataaagccaaaaaatatatattctgtctctcatatttatgttgtggagttgtccaggtttgatgggttatgtgaaatattttgtctcatttcaaattatctcatgacacaatcataaatatgtctacattatgaattaatgaccttattttgagggtgtcataagatgtccataagaaactgtaacacatatatcataaaattgttacatatttatacaccaataacaaatataaaaaattacttaataagtatgaaaattaaaaaataaaccccttttatgtttagtttatcaaaattaatatatcttattttatatataaaaaatgcttattattaaaaaaattcatcaaaaaaaatttattttcaaattacaatattaaaattactaactaataaaaatataaaacaattttaatatatatatatatatgggtacgaaagtcgtaacctatatacatacatataaaaaaaataaaaataaggctactaaccaaaataaaaagaataaaaggccacgctactaaccaaaacaaaaaatctggaagccaaactcaataaaaaaaagaataaaaagcaaaaggtgtaggtgctgctacaaatgaataaaaaagcaaaacgtgcaggtgcttgtaggacttttgaatagtaagcacggtaaagtcgtaaatttactactacttgaacagaaaataaaaaataaaaatcatgatacatgacacgatgtctcactaaaaagttagcacgacttatctctaaataataatttttttaaaatttttactcctatattaaaacaagaatgccccttatcagtcaaaaagccgcaatttgcataggtatggcctgcgttagtttgcaaatagggcaagcaggatttgcttgcgaggtgaacaggcaagtcagggttcaaatcattttcacattggtttgcaaacctaaataaaaatatttttaaaaaagagctaaaagtctaaaataacaaaaaagaaaatattacatgggttggttcagtccaactcatgggttaaataggttaacctgaataagcaagcatttaaatgggccaataggcatcacaaagttgggtttccgctagttgtaagttaaacaacaagccttcatgaaaataaacattaaaaaaagcctaggaccatgatctatgtagccaactttaataatattatgcaatagtgtttttaacttcttttttataataggacaagcaatattattcgattacgacggacaaaactcttcgtatttaatgcacctgcatacacaagatttaaactaaaaaattgtgatgaaactggagcaatctcaaaccagctcattcaccacttggagatagtgttttgaactttttataatggaggcatgtgatttttttgtattggatagttttttttttttttcagaccatagacattttttaatggagataatcatgtttaattcggatataattaatgtggacgcatattaagtatctagcgcaattacatatatgtgactcaaatttgaaactagtggttaaattaaaataatcttattcagatttacgtacagttgtcggatagtttcattattataaattatgaatttatgagatttaacaatatgataaaacttagaaataatttcttatatgctttgtgttgtttttcaattaaaattaaattttcattctcgtatttcatgtaataaagatttatattaaatattaacataatcaatgaagtgaaactttaattataattaggtaaataatactaaatatatcttcgaagatgtatcttctaagttttgtgcttcttagtacataataattttttaggcttattttatcttaaataaataaattaaactcgcttttagcaaacttttttaaaaatatttattgtttgcggaaatataactttattatattcattcagaaaaaaatatctttattatgctcaaaattcaaaaacaaaaagtcacatttgaaacttgaaagctgctgactgctgactgctgactgctgagtttagcattgttggtacggccacgcgtcccacgaacttggatgttataaaaagttcttgaagatacagtttattatatattaatgaaatatgatttattaaacgagcaaatacctggcaagctccagaagaattttttttataaatcaccgaaacaacacagtcatattaccgaaacacaactttaccaacgcataaccaattccacaaattctttttataaatcaccgaaacaacacagtcatatattacatgttgaagattcaggttaagcatataagcaagtccacttccgaaacctggattcaaacggactcaaaatttcaagacatgtatatcgcgagcgacatgtgggtccaaacccaaatgtccaactctatcaaagactttttggttatttctttcatttttatttataaaattcaagtttaaatttaaaatgatattttttctttttataaaattcaatttataatattttttgtagtaattattattagactaaaaatatctctcattaaaagaaaagataatgtattaataaataattaggagagacatgaatattaatgataaagtgttcacatgttaaattgaatcatatttaacaaaacctatcactcaatcccatcaaatatttacgtattgggtttggttaggtttgtaaacaaaaaattaaacccaacctagtcctgatgataaattggttgactcgagtaaagttaattggatctaaatattttaaaatatatattttttatttgtaaaaaatacaattttaaaacaataatttatttttgcgcaaagctttatatgtatataatgactaaatatattaaaaagaaatcaaattataataatatttgactaatagaattaattatttcaagactaatatgatattttactttagataaaaataaaatgttatattaacataaaaaatataaacaaaataaagacaaaaataaaaatgacaacttaaaaattcatggattgtttaatttaataatttaatacactacacgaattaaaaaataatattttttacatttaataattaatttacatataataaatttaattatatggtatgaatttgttcaagtcaagttcaatattcctaattaataaaaaaagatagttttagaaaaagttaaatttttttgagattaattaattttttaatcattatataccgcaacagagggagtaaaaaaatagtttttaatttttaatttttgataaaataaaaacaatcgttcgaaataatggatgtaagtagttgttggtgtgtttaaaattgaaaccgagtctcttcccgaaaggagacaaagaccagacacagagcgagagagaatcgtaactgaagcggtcactggaagttgtctctacagccctctctctctctaacgttttcagccatggcaacaacacccccaagccgatcatcatcacacgcgtttgttgccatggcaatcttcacgactctgttgtggtgcgcgtgtgttagcacggcggcggcgaaggagagcgtgtacgatatactccccaagtacgggctcccgagtggtctgttaccggacaccgtcaccgactacacgctcgacgaggatggccaattcgtcgtcgttttgccgaagccctgctacatacagttcgattacttagtttactacgagagcaagatctccggcaagctcagctacggctccatcaccaatctcaagggcattcaggtccagcgcctctttctctggttcaacgtcgacgagatcagggtcgatttgccaccctccgacagcatctacttccaggtcggcatcatcaacaagaaactcgacgttgaccagttcaaaaccgttcgttcctgccgcaaatccctctcgtgcccccctcgccttccacgttcaattcaggttcgccattcttttactcttttcctaatttcttgtttagacgctcgatttttgttatttttggaacactagattaggtttaattgctctaatccagaaactggttcgaaaagacttatacttaagtaaacatcgaagctaagtatggggaatagtcaacgaattttttttaggtctctattttttgaattttgactgaaatggttaaacctttgatgctctgtaattagtttcatgagaggtgtgattcaaatcaccaattatacccttacatacatggttaccagacacccacggagaggcacattatagcacttgtatgctttcagggtttcttagtgtgtatgtgttttacgacatgcgtatccacatgctcaggaatttaaagggatcatccacttgaattagtctaggaatttcgagagattaatttttctagttctcgactaaaacagagtttttgaaaagttgaaggaattgactcaatacagtctatatattgccctatgggcaatacaaggaactcaaactatgcagtggacctaatttatagtagtacaacattgaataatattgttgggattactaagggctctaattcagtcggttaaacaatgtacgtgaattattgtaaattcagtaatacttgagttcaattccttatgaataaaaaaagatagaaagttgttgggatcagggctagtttcgcaccagttccttggttttaagccgtttctgcttgtattaaatgcactttaaagttgaaggcagtcattgatctttccttgcgccaagggggaagtaatgttatagagttcactctacttatggccaattgtgagtatgtaataactcatgaaatatttggactcctcaacgtctcttatgatatgcccaaaagggtcacgagggtgtgtagtgtagtgtactgattgggtctgtggatcgggttcaacgtagtagttgatatctagtggctgaaatagggaattgtctgtgtctgatgcaggatattatatgccaagaattgcacctatgctaatagcttgagtttttggcatgctgacaaacgctcttgatcatatcacctaatatgagttttttgtgtatgcaatatggtctgagcatgggaagggtaggatggttaatatgagcttttcaatcatctgttgctcttgtaaatgaacaaacaaatcctcaaaactgcaagttttccactaattagaggcatacactagttaagtttgtccatattatcttataaataaatatcatctgcaaccttttttcccttgtttggtattttttctaatgcagtcagagaaatactaactcgcataaaacttctggaaatttgcagctacctgctccggtcgatgaaattcccatgcttctcactgagtagatccagtttcatactagctgttgtatttcataatggaatgacgttttaacctgtcactggccctctattgccttagcttatatttgtcaaagtgtccaagactcgcaaaaccgagtgtggttgcgttatattatatcctcgggagacctttatgaacatgatattatgtacatatttaagctgagacttcaacttcatgtgtgttgctgaactttcagttgctggtaagatttaaacgtgcttatttaataatgaatgccaaagtccggtcttggctataacaacgattgggatgttggcctttatttaccctgttaccttactatcctcaattgttttccacgtgatgatctttttttctgtgtactagggtgattacttttcctgatttgaatataattgaaatcacgataacctcctcatcagtgttaccaaatgttttcttaaaagtttaatatttaatcagtaatatatataattagggtgacaaggagagagaagagggatattttaagagtgtaaaaaaatcaattagcttgagcctttttgtgtcttatacagtgggccttcttgtcagtaagttggactcaacttgtatgcaccaagttgcaaagcttgtttctttttagtaagggcatattactttggtgtaggttataaataatacacatttatgtaagttgataattcatctatttatttattgacatgtggctgcttttgtcatgtcgggtaatgaattttaaatttaatcagatactatctaattaattttgaattaatttaaacaaatctaataaaatattatcttatcaatttaatgtctaaaaaaaaaataaagaactatatggaagatacaatattacatgtctagaaatatgtaagtttatcattaatgaaaataaatacatttattatatagacatagcacacttcattacattgatgcaatttaatatctttgataaagataaataaagaaatatatggaagatgtaatgttgcatgtctagtaatatgtaagtttatcattaatgaaaatattaatcaaaataaactaattaatgtagtaattattaatgttagtactcaattatataactatacatgagttgttaaagttaagaattaagtagtgattaattaaatatgttgatagaaaatcgattagctagtcatggcataaagaagtatttattaaagagataaaatttactttggtgattattatgcctcaaaaagaattaatatctgaatatctattgagacttgagatatatatattttttaaccaaaaaaagaaagtagtgattaattatacaacatttaaaaatttatataaatttatcttttcacttaaactattcaaataagacataatgttcaatatttattatttacaataaatagtgtgttcatttaattactcaagtatatgtatatgttggatttatatatggtactagacatagcacacttcattacattgatatgcaatttaatgtctttgatcaaataaaataaactatatggaagacgtaatattgcatatctggtaatatataagtttattaaatgtaataatgattgggtggagaattagagattcatttcatgtaaattttatatgtaatgttagagagttttaattttgaaactatatatgttatttggaaattatatgatggttatatgaattatttatcttaaatttataaatcttgcaaaaatgtcatatagatttaaaatttttattcctatactataattattagagtgagtatttaatttgaaccacattaaattttgaattgaaattttttttttattttgtaataattaattaaacaacaattgttaatataaacaattcactatcaaattatcaactctaataaaaataaattgttaagtaatatttcttaactttaaacatctcatttaaacacggacgtttgaagatggtctaagttgtttttatgtcaatcaatagttcagttgattacagttgctataaacccgtaataaatgtctcattttggtactattaaataaatgaacacttagaaaagatgtcaacatcgatccaaccaattacgtaatagcaagtgtaaatagagggtcctagcacaatgatatttaaagcatacacattgttgaggtcaagtaacgggtccccttcaatggtttcaattagttggattattaatcacgcagacaacggaggatgggcacacactgaggcaaaaataactaaaggaaaaagacagtacaacctagtaaaaataaatcacaaattgcataacatatacttacatgcagaacatgcaatgaatccgagaaataaatagacacaaccaccaaaacatcctactactcttgatctcggttcaaactacgaagaggaacaaatgagaaatgaaaacaaacggtaaaatcccacaaagcacctctgtcaccaaccacctctttccccacccaccaccgctgttgttgttcgtgcttgtgcttgttccctttgcagtcgcgctattagctgcagtcaattttcagttcaaaatcagagactacaattatattttggtctcttaaccgtcacaattctataattaatttcctcgtattttcaatcgtgtaaattagattctataattcattctgagacccaattaacagaattgaaaataccaatatcagtgagttcacaattactcacacccattcattcaacctattgaattagactcattgaagaaaaaaaatatgaataattttgacaataacatcaatttttctttgtatgcatatgaaatgagccaaaaccacagccacaaatcatgatttaaaaccctgatgcggacaacaaattccacgatagttaaaggaatgaataaaaagtggaattacgtataataaaaattaatcaacaatatttaccactagggactgaggagggactagttttgttggtcaaggctttttcaaacccctcaaacaccttagcttccgtggagttaggtgccaaatgcaaaagatctgaaaacaacatataaaacatcaaaattgggtaccggcacaacataaaggtaacaaaataagtgtcataaaaagattatgtgcgtgtttggagtggcggcaccgtgaaaaaaatcgtggccaatctcaggatcgagccacaataacacatagttgtttctcaaaattcaccgtcacaccactgtttttggcccccaaaatcgattttatgccgtatccaaacacacaccgtatagttacacacttaccgacacactgagttatattggtgggtgttttacaagcatctggtaaatttagagcaagggtgacgttgatcttgaggccaagactcgggtcatcacgatccttgatgaggatgcagaggcacctcttgctcttcccaataacctctttgataccagagcaacaatccatggtggggactttggcttcaccaccgacatagggaagacaaccagctagaccaagaagtttgtcggtacattctgctttgtctcggttgatgtctgaggttgcaaaatcgaccaaaaggagcaacaaggctgaggagagtgctagattttttgcccctatggaacgcattttggagttgcacaaagaaaggagagagaaaaatagtttggcaactgagttctctgttcctagtttctagtgctttgctttgcttgcctgccacttatgaaccttattgcacgtccataaccacatttgtttgcaccttttttctttaattgtatatttatcctcttttaattcatttaattaatgcaaaaagacttatttgttatatttttttcttttagcttttgtgaagaagtaatagtcattgggcctatttggatacaagattagaagtacttttgaaaatttatctactgaaaaaaacattatatttccagtagaaaaactctcaataataacaactgataaaagacaagcagacaattacttatccattcattttttgatctctttaattttaagtagaagtaattttattttttagaaaaaaattaaagtaaaactcgttgtttctttaaattaaacacatatgatcctcttaccaattttttaaaatcttattttctatccaaatattgaaaatttatggtaattttgataaaaataattttaaaagtttagaagtcatgatttttaaaaaaaatgataaaataagaatgacttaataagatttgaaaaagaagaaaattggactttttgaattttgggtatttttttcatattttagttaaaaatttgaatataaaaaaagagtttcaaataaattatctaactttatttaccaaaattttgaaaagaaaaaattgttgtatttttaagttaaaaaatataattaatagacttaattacccgaattagaagtgatgtttggttcgttttatatgacctaattcacaatatctcttgtattaattattttaagattaaaatatctctaattaaaataaaagttgtaatgtcaaaccaccacaagagagaggtgaaaattgtagttttgaaaaaaaataagatatatatatatatattgttataaactaaattaaacacttttttaattctaataaattagataattggatctaataaatgagactagagggagtattttttttttagaaaatgatttagcatttacaattttaacaaagttcaatgtaagtttgcactctgtactaacacccatataactaagattattaataaaggaattcaaacctagttagaaattaaacacttgcagtatttttttaagattttctataattaaaagtgattttttttataaaaaaaattaaattcaatttcaatctgagttgaatgactctttcaacgtttattttttagtttgtaggaattactaaatctgacgcatttcttatttttttttataggtcttaattaattgagatattggtgaaaatattttgattctttaaatatttcgacgtaaaagctaatcagttatgttaaagaaaagtatttaatgaataataagaaaagatacaaaatgttactgtaccttaaaattttggagcattgaaaacttagtaaatactcgtattaaataagaaagcaacaatgcagcattagactcaaaatagaataaatattacacaataaaaaaatttaaactcaataaattcgtgaaaggagtaaaggtctgcgttagaagctagctgagaccaaattaatgtgcaactaaagcatctcaaattctcagtattctttcgagtctaactgaagtcattcctcgtcatcatcaccagtgaaagatgtttttgactaaaggaacttaattatgattataatattaggctaatattcaatacattacacatattctctttataattttattattttcatttttatctataattttttaaattgtttgtcattataattcatccgaattgaaatacgaaatatttagtattagtgggtatatgttcctttcgaagatgatttgtctgtattactaggttgactgacgtacgtaagggtgttcgtgatttggattagatcgattttaaagcaaaaaatcatctgatcaaattctttcagttttatcatttgatcatctattcggtttaacttaattatatcaaatgtctgttcacttatgtgtaaattagtttatacgatgaatatccaacattttcctctaattttttcttctaaattatatatcacaaaacatgtcaatcaattgatataaatttagtttaagtttattagtagttttgaatttgaatcatgagcatataacgacaataaatatttagagtaaaaattttatagttcgtgattgtatattcaacttaagcaaaattgttatttgtgaaatgtgtggtttttaccaaataaatatagcaagattattgattttaattaatttaaaaattatatctagattaaattttaatttattcagagtgtaattttatttatcaaaattaaactctctttatatattatttttgtgaagattagtttcttctaataaattcaactttgatcgggttcaatgccaactttaagtaaaaaagtacaaaaaaataaaaatagaatacactcctacatgataagatgaaatatgatataaaaaatagtaatagtaataataattaaagttgcaccatatcgtttgctggccggtataactaaattaacatttaattacactaaaaatatttatttatacaaaatatgtgctcagatcttcttcatactcaagttggtagagtggtggtaattaactatggcgcgacaacaatgtcgatgggggtaattaggcggtgattgctgattaaggagtagttttgagtaacgtgggtggtgacttggtctcactaatcacaaaactagtgatagtgttgctaatcgtttcacaaaagattttctcataaaagagaagacctaattcaaaatatttagtaaaatatattatttaatttcttgtttaagataaaaaaaaaaaaaaagaagactatttaatcttgtttgtcaagcacgatcctccaatatttgttgaccaaacattatgacatatcaaaatattttgtcatattccaataatgtaggtgcatgattatgtttatcagttaattgatattgatattataggtagtgatctcgttaatactcgattaataagatcatgcaaggatcaaaatacgattcgatccaaagaatacataatcctcaacctcaaacaaaaggtgtgtagaaattaagagtataaggattgaaatatgaactaattaaagaatatataatctcctaatttcaagtatatgattcgtagaggcttaagagtgtaaggatcaaaatataatctgacccggaggatacagtaatcgtatgctgatatgcaatggtggcattaaactagttttattgaattgggttcaataatccatttggttgagtgttaagctagtttcattggttgaagagcgagtggctggctaaatcggttaaagtaccgtaaatgtatttaaatgaatatatataaaataaaaatactgttatgtaataaacaaataattaaattgtgaaaatagtttaattttgattagccaatttatttaattttaacattgttaatcgtttagacagtcagcagtaagaaaaaaaatcgattacatttcgtaaagtgaaatattttcaagagtttccattcaatatgcatacaaaaatacaaatagaaatattgattttactctacggagtaattttctgaccatagtagtaactagtactaaacacaaataaagaactttccagagaaatcaaacgacggaatcagtgaaatgttttctactatgaaaaaggccagccgaatagaaggtgttaggtgtgcacatctttagctcggggatggatgtcatggagattagatgatcatgaaaagaaggtaggtggggtgtttaattgaaatcagacgattacggcaatgactgatataaatataaatctatctatcatcgttcataatgagaaagaaataaccataactgagtcgggggaaaaacaaataccaatgccgaatttaggattttatattaatttttatggaataaaagtcctttagagcctaaaaacattataaccactatttatcttatctttaataaaaaaatattagtctataaattaggattaacagaattctaacaattttttgggcaagacaagaaaggaactcgccctttgacaccacaccaagggataagagctaattgctggcgatgaagaattttattttaagagctagtgaataaatataaattggaaatggatgttcatgggttaaacttactttttatagtagttttttttaaaaaaaaaaataagacatgaaacttaaaatatttttacatttttatgtaattacaaataactatgtatagtaaatttattaattttgataataattattccaagtgaaagttggaaacttgaaaatgatgataaaagaagtatgccaaacaactgcaaaacaacaattagcaaagtccatgtagaaaaacattgttgttacttgtgattgatctgtcgggattggaaattttttgtgactaataaaatgtaaatgagttaaattatttgtgaattatttgagtttcacttgtaaaatatttgatcaagcttatttaattaattaaataaattcaaacttaaaattatacttgattatttaaatgagtcaagttcaaattttacaagttcaatattaatagtttgtttatatataaagagaaaattaaaattatatatatttcaaaatatcatatcacatgtttaatgtatattattaaattcgtagattaatatatattgttatttttttacacaattattattaaaataatttattaaatattaacttgataatgtttaaaaaaattatttttttacaaattaaaaataattaaattttacatgagcttaacaagtcaaattcaaactttattcttttttaataaataaagtccaaatttttaattagatttatctaaataaataaattaaacttgattaatctttttttataaatcaaacttaaattttaagaggtcaatttgactaaagttaactcatttagacccaccgatcaagtgcgcaagtagtcgtttctataataatggccctatccgcatcattattgccttggaacgttctcaactcgcctctcacgtctatcattattaaagcatatagagtgcacaaatcaagatttgaatcaccatcaccttagcctctaatcctctatccaaaagtgctgttggttaaatttgatgttagaaggggacttgccaattagggcgttgaaggaggtgatggtatactggcatagtattgagagaagcaatgtccaaaaaaatctgtccttaacatcatcttcaatgacccaaccaaaataaagttcttgtgatgggaaagtttgcatggttgtcatgagaagtaacttgataagaactgattcgtcgaaactcaatcaaactgataaataaatgatttcaagtttgaattatatatacaataaaaaaatatcatgaaaagaagatattttatataaaagtgaaaaaattaaatttaaacaatataattaaacatgaataattaaaatttaacgttatatgatcacttaaaagttatataattttttatgttaaattttaatcctttatgtatgactatactattcaaatttaatcttttaacttccattttacagtttgttagctataaatatacacaccatttgtgtgtatatagacaaggaaaaattattcagttcttgatatggtagttaatttactatgattttaaaacaagtcatatcagaatgtattatgtattatttatcatatataatattatctgacttattttgtcatatcatattattaattaatttaattttttgttttttacaatgaaagtctaaagatcattttgtaaatttgatatttttatttttatttaatatattttaaaaagacacattaatctctcattgatttttaatcttcacaattctaaatctagtctttccttggtctccacgaagactttttaattttaaaatgttcgtgttctactacgttcatgacgacttcctctaaccgctgattaggaatatactgtgacatcaaataatttatttataatctgtgttgaaatatttaaaattagttatttcttaaaatatatatatatatatatgaatattttatttaaagattgataagaaaattttatattataaatgtgagatgaaaatggaaacctcaggagatccacgaggttttgaagacgcaggaggaggtgatgttgtaggttgggtcgaagagtcacattaatctattgtgaatagtaactcatcatgaggcaatcaagaaggccacagtacgtaaaatctaattagatgtagaaaacggtggcgtctagcatgaattatcccatttacggacttatcgatgaattatccatttttacctataatagcaggtcatttattggaaggaaaacaaaaaaaaaatttgataacaccaaaaaaaaaatataatattttaatagacaaatattatcgaatgaataggttgcaggtttcaaattacaaacggattacttgctgaaccgataaatcatttataatttttaatgataaaaaattaaattacgagtaaacgtaaatgccgatggattaataataatcttaaattgtttcagttggagttaacttagggtagcactttcataaataacatttaaatttaattattataatatataaaataataatattaaattcattaaatcaaaaaataaaatttatataaacaaatcataaaaataaattatttaaaaacaaactataaatatttttaaattaaaaaaataattaacacaatataaaataattatagattttttaaaaatagttaaaatataatataatttaatgatataatataatttgtcaattaattgaaaccatcttttctttatattaaatttattaaataattattttataaataatattcaattaaaaaatttattaacaaaaaaaatatatttatatattttttaaaaatgtttaaaatttaatattaataaaattacgtaatatataataaagttaaaaaaacaagcttacgactttaaagtcgtaaccctttacttgacgcacccccctttttcatatgttacaacgtattttgttaatttttttctttcttttctatttgacccttacatcaagattgtcttcgttcttttgcaactcccactaccaaccttgcaggactcactgttttcatcgaaaatgaccattaacaaaaacctgcaagtccaattaaaattaatttgaaaaaatgaacataaaaaataacctgtttttaaattttaataacctatttttacttaaaaatgaccattaatttttttaaattgttcgacggttcctgcgactccaatttctccttcaacgagggctgcgaaaaggtgtcacctgcgaatagcagataatatatttggctttgattccccggattcagctaaatcattggatgctgcatatgctcctacaattgcatcaaaaattccttgggtggctgttttcagaaaccatgaccaggaaggaaccctctctagggcaggggtgatgaaccatattgttaagatgaaaaaacaccttatctaaattcaatcttctagaagttcatataattaatggttttgcatgggaactataacttggatgttggaggagtagaagacactgattttgaaataaatcagtgctcaacctgtactttgtcgatagtggagattattcccaattttctactactatttttggttatgatttgatcaagccctcccaacaactttggttccaacgaacatctgcaaagcttaaggtgctgccttatcccttcatgttgtaggccaccaagccagttgaaaaacatttcagaaaccaagaaatgaagccaaaaaaaaaaggttaaaaagacacactggtagctctcaaaaccagagcatagagtttacaaacaaccaaaatccgataaggaacaacttaaaaaaattaaaattaaaatcaagagctttctcaatcaaaatccaaacaagccatgtagaacaaagcacaacaagatcctgatctacccagaagagatggaggccggtgtcggggaagaagcacaacggggaggagagagaaaatgataaatttattgaattatattaaatttttcgatttttttattattatattttctttcgctcatgaacctttttttttttgtgttgccaattttttttttgttttccttccggtaaatgacctgctattgtaggtaaaaatgggtggttcatcgatgagttcgtaaatggagtggttcatgttagaatcgaccgtagaaaacagagaaatacatgaatgaaataaaattgataagcatgtaaatatgaaggatcttaaattaagggcacttgggatttccttccttggttttccaattgttatagcatggatattcctccttgtgaccataggttcctgatggcataaacatgtattacaacacttgtgttgagtcactgagcaacgataggcacatgcatttccacattctgcacaattaatgatgtcatcaagattttagttgtgaccaatcaatacattaatctttttcctcgttcttttcatctataaaaagtttaaatttaaataagttttgaacaagtaccttcaggacgaagtgatcccgccccaccagcctgtggattatttaaaaaataaaaaaaacaaagaaaaatgaattaaatagacgttaaagttaatgatgcatctaggggtcaacaattatacattcatattatgtatgttactccaacaaaaatgtggcttgtatgtgaactggttatagcttccatgtgaaggttcttggtaagtgttagttgcaagaggtagtccagttgcaagcacttttttccttattactaataactagcaacaaaatgttgttcagctgttgaatagaaatcaaaatgttactcagttatttgtttggagcgtgctcttttcaggattaagatagtggtgcctgatgaagctactgcatcaattgattacgcaagagatttgattctgtagaaaaacattaggctgagtttgaaaattgtcttctggattctcttcaaaactttgtgcttctctttaatttgtttatttagttttgctttcgctctatgtttgctttggtttgaatgggcaatcacgagttctagtttgcatcaatgattgagcctctcaatgggtttactcctttttcttgtaaaagcaatgctaatcttagattatggagtctctctatttcagcttcatcaattgccaatggcatcattgatagtctctcgatgggtttactcctttttcttgtacaaacaatgttatagagcaactagaatacaatgctataagaaggcccgatcctggggcagggccagcggggcctccgcccagggtccaaaaatttttgggccagtaatttaagtaaaattttttattaaaaaaataaaataaaaataaattaaaaataaaatctatgttaggggttcattttgtgtgttaggggcccatttttttcatctcttaattttaatattatttgtatttcaaaaaatttatgtgtcaggggcccattttttttcatttgttaattttaatattatttgtatttcaaaaaatttgtatgttagagatccattttttatgtgttagaggctcatttttttcatccctagttttaatattacttgtatttcaaaaaatttgtgtgtcaagggcccattttttccatctcttaattttaatattatttgaatttcaaaaaatttgtgtgttaagggcccttttttccatcccttagttttaatattatttgtatttcaaaaaaaaaatgtgtggtaggagcccattttttccacttcgccttggatcaaaaaattttcaggaccggccctgactataaggttgtcaatgtttactcctttttctttttaccatcttgaaatggaccattagtatctttgaacatttgttagcattctcctatttataaacattacaactttaatggttagtaagaagatacaattgagttttgcggtttgttagcccataactatttacagcatttgagtgtacacacacacacatatacatatataaacataaacggaccctccagaacacagcaacatattctctattcctcgccacaagacccttttaattatcgttggttgataatgcatattaaccttaatttatacattttttgagatataataccatttttttttcaatatgaagagtcacaataatatagtaactcatcatgaggccattaaggcctcagtaaaatcttattagatatagaaaagtagaaaacagagaaatacatcaatcgtgcaattgagttgataaatgataaacatgtaaatatgaaggatctcaaattaagggcacttgggttttccttccttggttttccaattgtcatagcatgcacattcttccttatgaccataggttcctgatgggacacacaaacatgtcttacagcacttgttgcagaagaacagacatggcttcctgtgatgagtctctgagcaacgatattcacatgcatttccgcattctgcacaatgtaatcaagatttcagtcatgatcacctcaaccagattatatattaatcttttaatttcctcttcttttttttttttcatctagttaagctataaaaatgtttacatttaaagaagtaatttttaactagtaccttcgagagggagtgatccttccccaccagcctgtggattttaaaaaaatagtcaaaagacaaaaggattcatagacatcaaaatgatgaatccaggggtcaacatctttttataatgttgttaattgttagtccgtgaataaaatccatgattttttctttttcttctttttactatcaaattaattttataactctcatgtgtcaacatttatatgtaacttaattatcaatttgatttttaaattattttaaataatttaatttgatttttaaatttttaaaaataaactaatttgatcccaaaattttaaaaataattaatttaattttcaaattattttaaataatttaatttgatcctcaagttatttaaaatttaataatcaaattgatttattttcaaaaaattgagactcaaattgattaattttaaaaatttggaaccattcatttttaagaatttaaagattaaattgaactttttaaatttttaaaatttgagaactaaatataactatttaaaataatttgagcatgaaattgataagtaaatttttatacctacgtgtgtgtatatatatatatatatatataatagataattatatgcaatggaaaaagaaaagttaatcataaggggcaagaaatatataattatacatatatgacgcaggaaagcgcagagaaactcaccgaaacaatttggatcacagaagccatggggaggatgagaagaaaggcatatcgaagacaaacaattttagccatagttttcgccaagattagtcaataacttctacttttatattttttgtttctttacttctgcttttataagcagtgatgtgatcaaggatttacattaagaaaggctgtagatggcaattcactaactttgagcgcctactttgggataaaatcagattttgtttaaatgtagcaacaaaatccttccaattaatgcaaatgctttaagtcaactattaaatgcatcgattggttagtggagaatttttcaatttaatgagtgatatcaagttcaaatactaaatatatagtttgttaactacttagataattcttataactcataatagatatactcaaatcaaatagaattattttctataaactaccctttttattattgacagcatactacctttatttatatttatatatacaaaaaaatcaacttgaacataaacattaatataatattaaatgttattaatgtataatttaaatagacatataaataaatagattttctcttacagtgtattgattacaatattatgaaatattatatatactaaacattaaaagcattgttataaaaaatttattacatttaatgatataataaatgttaattaatatatatatatatattaaaatattaagtattttttattttacttaaaaattacctaataaaacttttttaaaactgattttttttcttttatagcaataattattgtatttattaaatattttattaataactaacatcaataatagtattaaattttatatttactaaatataatgtaattattagatttaataaatgtaatatatcatatgaatctatatatattaaaaaaatcaataaaaatatatcacttacatgaaaacaatcattaaaaatttaatatataaaataatatttagttgacatgatgtcatgttgagcatttttttagatttaattacatagtctttatatttacacaatttttacgttttactttttacacttgaaaattactcatttaagttcatgtgtaaacaaaaattttgctttatagtttttattgttaaatacaatttaatgtcgttaacaacatgatatgttgcatcatgttgtctaaaacattaatatgacattgactttaaggtgtttgcacgatacgttttagtccttatacttacactactaatttttatgttttaatccctacacctacacaatacattatttttaggttttggtccctatgctttcaccttacatttttgtccatagaaaccaacctacaaaccaagcatttcattcatcatttcatgtcaatgagcatgcattttccttatgctaatatgtgatctagaaaacaaattaactggcaacctacatgtttttaagtgtttgacgcaacaagattaaactaatgtagcaagtcactattattgtaaggaatgtttgaaccaattgctacgcttggttacctcgtcttatcccaaaagtgcatttgaactctacgtccttgagactctgatttagagtcaacaaattagttgatgtaaaacaataaacgtatttaaaagaaatcgaaaccgcaaaatatataaaaggaaatgttaagggaaataaaaaaggaaatagagaggaagggaagtaggaggagcaagaagagatcatataggaattaaaacataaaaattgtgcaagtagagatgaaacataaaaatagttcagaaactaaaccataaaacacaaacatgtatgtcaacactacattgtcacactgttaacgatgttacattgtatttaacgagttgtttttatgtattgggactaaaacataaatattgtatagatcatatagagataacaaaataattaattttttttttttaaaggacatgaatggcttaaatatttggtagagtaactgaacgtctggactgaacataaaaaagtcggtgctcatttaattgagataaataaaactaatatatctaaagttcatttattttatgcaactcaagctggaaataggaaatgcaaattgagtaaaggcagcaggaggaggtaaaagagaggccgagtcaaatgtctgaggtaatttggagcatttttaatttttatagtggtaaattctaaattaaaattttatattatttttcatacatatgatagtgtgatagtgtcatgtaaaattaaagatttataagtgttttttctatttttgttatgatagatcgatctcactttgagatcttaggaagaagaataaaaattattcttttttgaacaagaattttttcacaaaaactcgttctttatattagaaatttatttattttctttattggaagatataataactcaagattcttgttcaacatcttgtactaaagatgctcttagatgtgatgcaacaattatggttacatgacatttttttaatgtatttttgttatttgggaaattttaattttttaagttttaattatataaaatttatttaagagtataagtattaaaatactagtatattcttaatatattcatgaaaaatcaaggttgaccggttgacattacaaaccaaacggttataaagaattaagaaggacagttataacggaaattacatataagaaatgctagtgaaataaatgcaaccattctttattgtaaaatttattgatataaaattcacccattctttattttaagtgaataaatgcgttaattaatttattaacaataaaaagtcgtatttattgaaaaaaaataacttttgaattataagcaacatcatttaatataacgattacttaaatcattaaattaatgaaaatttctaaaataaaatgtaaatttgtaagtcttaattaaaatcaactttttaaaaaaaattaagatcaactaatttgattattttactaattttaatgaatgagttaattattttttttatataaaacaccagaaatgattttttaaatatctgacaaaatataattattattattataagaggagtattagtaccatcaaacgcatacatcaattgagtggattgttcaaacataactcattggtcttggaatttaaatttttaaatatgtaaccgtattaaatgttggaagacaaaattttggcacggctatcaccaagaaaaataagaataagaaaagtgattaatgttaggagcgtttctctaattaaaataatatgcatatttatgggtgattgacttggaccagtgttcacagccactataaattcttctgtgctgaacacttgttctttataccaataagcaaattaataagagtaatttgttcaatggcagcatcatcatcatcaacagcaaaagtggtttctctagtgttaatagtagtagggagcatgatgatgaatattgtggaagcaaacacttggtgcgtggcaaggagcaacgctggctacggagcactgaagtcagggttagactttgcatgctcacatggagctgactgcagagcaattcaacccggtggcagttgcttcaatccgaacaccattcaaaaccatgcttcttatgcctttgactgttactatcagagaaatggcaaaaaccctggtgcatgtaattttggtggtgcagccaccattgccgtttctgatcccagtatgtacatatcttctcttttctctcttatttatgtgtgaaaatcattgattaaccatatgttgtttctttctgctttgttttcatgtgtttaggctttggacgttgtgtgtacccaccttcttcaaggtatatatatatatatatatatatatatatatatatatatatatatatatatatatatatggcctattttctttcttttcttgtaatgttgttttttaaattggtcaaaccgtttaattctgctcctcggtcttggattaaatgaattttccttctcaaatttatgtagtttttcctgctatctcttgtcactcattttatttatgaatgatgacaaagattttcttccttttaattttcagcactgatggaggagttgatacaacactcacggggcttccaatgaacagcaagatattacaagaccagaccaacaaggaggattgaatactgcccaagctaatctcaataacaacagagaaattatcaacctgttattttatgatacaaaaatttttattaagagaatttatataaataaataaagatgtatttatttatactttgtttcggtttattttaataagttcattagtataatatatacatatatatatatatagtttatgaaactaacttataacttacatgaaaataatttaacttagtttcccctttcgattataaagacaacttagtaacatgcatgaatgcttgcatgagaaacacgtactaattaggtgcttaattaacaagtcatatattttaaaactaaaacaatttgttataattatgacttaaacaaaatgcaacttctgcttttttttttttttataaaatatctaaataataaatcacttttttcatacattcttagaaaacttaaataagagaatccataatctaattcaaaatttattcaagtcatttatgcttccaagtgggatccaagttcactatgatggaagaatgtggtaaaggaaccggaaaaaaaaaaggcaattgtgcagatttttcgccgaaggatagggggtcaacaagaaactccacaagtaaaatgtccgaggcgactaggtacctctataattattcagttaacttgttgaacattaaatgttcagaatgtattttatatatttttattaagtaactgttaatgacatttacatttagttcactcaataataaatgtcaaagaatacattattaaagtttctctattaaaaaaaaatcaaagattgaccgtagctgacataagcattttaaagaattgaaaaggacagttatttataacttaacttttgtataaaaaaaaagtgagaaattcaattgcaattgtacaaaacaacaatgtccctttaaatttattaattttagttatttacaagcacgaactgaagtcaaaaataaggtaagcaaagttgtgaataacagaataagtagtatagttcataaataatttaatatactttattaaatattttaaattttataattaatactaaataattggtatatttataatataataaataatttgataggaagaattcaaccagaattaactttcaaagaaaaaatctgacaaataaaataaataaattttagttgagataattatcgtttgactttttttatcagtcaatattaattagtttttactaataaaaaaaaatcaaacatagaacgtcttctttctctgttcaacctttatataaggccttgattactgttgatttattttaagagaattgaagttaaattcaaaataaatacaaatagtagcacgacatgaatttataaactagaacaaatagcacagtcatgcatatattacacttcagtcaattgtcatacaaaatatatagtacaactgaggagttatactcgtaaattacgaacctgaagttcaggtctttataatagggaaactcatcgcttaatgaaataagtaatgtctcatcagtatcgaaagccgttgctgaaggcccaaatgaaaaaactgggtcgctaatataatttttttaaaatataaataatattaaaattaacagataaaaaaaatgaatacttaacacataaatttttgaaatacaaataatattaaaattaatggatagaaaaaatagatctctaatacacaaaaaatgaactcctaagacataaattttttgaaatacaaataatattaaaactaagggatggaaaaaatgacccctgatatatgaattttttgaaatacaaataatattaaaattaaggaatgaaaaaaattggtccctaatatacaaattttttaaaataaaaataatattaaaactaaaagatagaaaaaatggaccctaacatataaaatggactcctaacatagattttattttttaaaaaaataaattttatataaattatctgtgaaaaaacttttagaccctggccaggtgccctgttcaccctgtcagggccggccctgcaaacgttgcaaatatttctgttggaccatgaatagtacttttaatctaacaactttgggcctttagaaactactacatggcccatgaaaacatttaaaaattaaactcaaattcggattctcacatataaatgtccacggcaagctctttggtctagaatctaagtttttacacaccatctagaaaagaggaatgccttaagtttttaaatactcactttaaacaaattaggaattaatttaaataacttatattcttccacctaagatattaggattagaatataattgtgaattggaaataaattacatgaactggattgtttaaaattattatattgaaaaagggaaaaaatcaagttcaactttgattattcaaatcatcaatttcacaacaatattgtgattatttttttaactattatccaatacaattaattggtaaataattttgccaatccttagtttctaagttctaattgtccgaatatacattaattctttgcgagataatttggatgtaaaaagtcatattactatttcgaaacttgattttatttaatcacacaaaaaaatctgagcctgataacataattttgatatattgttgagcaagccaaaaatttaattttacaaactcataatattagacactaaacagaataaacttttaccaattttaataactaatttaatcatttatttgaatagcaattgtcaagattaacagttctagggctagaccatatagttgttattcaccccattgctttaacgattacttttacaagctttagttctcataatcaaacgagtctttcatttaacacatcaaataaaagtagacaaactagtatcaccccgttgctttaaccattactgatgaactgtcgtggcttggatattttatggacccaccaatcttttgtgataatattatagtcacctaaattaatatgcaaacccaaatctttttcctattcaaacacatttcagtcaattactatcattttgtgcaaaaacatgttgctagcatttatttacaagatttacacattccacaccctcatcaattaaaaaatataaggttaattaggtggttgaaaaaaaaagtaaagagaaaaatatcacaatttaaacttctctattaacaataaatcaacgattaacatttatcgattaaaaaatatattctcaccaacctcacgtagatctctttcaagttcttagtcataatttctctaatgtccacgataaatgtcatttcaacctcctccatcttgtttatacatattgatggaatattaaaaaaaggaatcaattaaagggtgatgaattaccatcaaagtccaatcctttggacttttctatatgattatttaaaatccatcgaattattgtaagtatcaaatgatattcatttatcaatttattataaaatttataatttaggaggaaataaaagtaacaaatataaaataaaataaataacatgcactttattacaaaaaaaatgcactttaaatatattattttattctaacaatcacatataatcatgtaatgtaagaataagagtgttttttattgattgataatataaaaacttttatattgattgtgtatatttattaaactcaataaaataagtggaattacgaagaaaaatatataatatatagtgaaaataaagttatactaacatgtaattactaacaattatgcacgtgtttttttttccaatgtacttcctacgtgaatccatatctttatatcatgttttattaaattgaacgattattcaaacacccgctgcataaaaatatattaatgattagttttaattagttaatagtgtaatttttcttataatcacactccataaaattcaattcttactaaaaaagtttaattttcatacattattaatatcaatttattttacattgttagctaattaaaaataatggtagatataatttttaaaataattacgctaaaaataacaaaattattatccatgataagttgtgttttttttttttacaaaatagtatattttgcttttaaaattaataaagtggtatactttaaaaaaattgtatgtaatgtgtaagtcggctttctttcctttttgtgaaatcaatttatgatggtctttttttttcacttttcttgtggtttattaatgtcacctttttttcaggaaaaatcgtcaaaatttgttttcacaaaagcaaattcgactttcagaaatttaactgacaccttgtatgcaattatatatacatatatatatatatatacttttttgataattttaaaaataaaatatcataaaaatatgattaagtcacactggaaacttctgttacattaatgatgtatagactattttgtctaaaagaaaaacatgataaaaacatatttgtaaattaagtatttataaggtaagtatttataagggacaaacacggaagaaatattttaagaatcaaaagtcaaataaatttataaaaaaatacaaaacacagttatttttcagagggaaaacgtatttaattttttattattattgataatgtaaaagtattatactaaaaaaagatgtcttttaagacattaattaaagaattaaaaaatatttattgtataaattataaaaaaatgttaaaaaatcgacataatttttcagcttccatttttaaattttttttaactaatatccttaagttacttgttaccatttttgcctattcaaaaatatttattagggagaggatgggcgttatggtatttgtattttttctcaccaaaagaaaagaaaaggagagaccgtgggaattgtatttcagaagctagctagcaaacgaggtttgattttcatactgcgtgcacagtgcactgcagagagacattaacgttagaacatagaaacctgagatacactatcatgctctgataaaaagaaaaagagaaaccaaaaagaaagcgaaagcgccttctattcccatctcttccacactcactcagtcaccatatataatataattttctcttttttctctaaacacttccctctctctctctctctctctctctctccacctttaccaactaagcaaagcaaagcaaagcaaacaatcacacctagcactctccctaatataactttctccaatggcagcaccaaagccggttcctttactgttattaataaccataataacaatgggtctaagcaagaatgtgttgggtcaagcgagttggtgtgtggcgaggagtgacgctagcaactacgcacttcaaacggcgttggactatgcatgtggggctggtggggattgtcttcctcttcagccagatggactctgttttctccctaataccattcaggcacatgcttcttatgccttcaacagctactatcagcgcagggcaagagcccctggctcctgtgattttgctggcactgccaccattgccaccagtgatcccagtatcatatataacttttctcttcatttccatttttgtttttcagtggatcagtgtcatctcatttttatttatttttatttgttttggtgtttgtaggctatggatcttgtgtgtacccttcttctgcaaggtatggcctttttctgtatggttttactctgttactaatattatacttttattaaagaaatgctgatattattctctaaaatttgttgagtatctcaagtcttgtttaatatatcaagtttttcttattattttaactaacaataaaagtgtgacaaggaatgtgtttctaatacgcctattgatattaatattatatggtatgaagagttttattttattgagtgtggtgtgtagagttcagttacaattggtgaaagtgaaacctactgtgtttcttgatgatgaagtaaatggattctcattctcattatcagttttttttttttttttttacctttatttctctttggtacctttcttctgtctggtttatatggcgtccctaatacgatagagacgacaaggaacgccgatggagaggatggttgttttgtaagaggaaatgtttgtttgaatgtgagttgaatggtctgtgacgcgtgtcactgtgcatgggggtgggtaacgtaattttcctccttttctgttcaaactttcttttatctgctgcaattacccaaactattttacttatagttttttggtaacattggtttgaatttttcagaaataaaagatttaatcatagttaagtgtaaacaggcccttatttgtgtgcctctttcgatcaatcttacagatggcgtcgcatattttacatataaaattttgaaactaaaatcaatttagacatataatttataattaacatttcttacgctaccaagtttgtttggatgtgtgttgaaaatatgcttatacacccttttttgggcataaaatatgtgcgcgtatccttttattcggcatcaaatcgtataaaaacaaagtagcttccatatgaacatggatccaattgaatttcaacattggaaccaaacaggcaatttgtgttctctgtgtctgattcttggttcttcaaagttcaaattttcaaaatcttgggttgctcaattttggtccactgacactgtgtgctctctcccagagtgtgttggttacttttttctgcactttgtgattagaccgttggatgagtctgtgtggcccacttcatccaacggcttagattcaccttaaccgtaccttgctgatcttcacactcatgaatcatgaccatcatttgtacacattattagtgtatttgaataactcataaaaatcaatttactccataaaatcacggccagattatgaaaaagtagaaataactttttcttgcctttgatttaaaaattaaattgattatttttcattatcaatctaacccaaacaagtcttatgtgtgatactttttttttttttataacatggtaaaagtgattgtgggaatatctgatgcaagtcatgcaacggtgtagtgtagtaataattgatgcttacgtttatgtcagctgttatttctttaccattaataaataatctgtggaaaatgacatacctagcaccttcttcagatgttctttctcaatcctgaaattgacccatccatgatccaatccacatttccatagatatgagcattgttagttgcgcactttgcatcaatgggtgaaatattctcatccatcaattcatctacatttcaactttctttcatttgttcattcatctgattcttgtttctgaggcttttgtctttattgcaagttaatagcatccatttgcatgtgatggtgaggttggaaagaaaagctataattgaatttttacttcataagggatgtggtagtgcagttcatggagactcaattggaaaaaattgaatctttatttggtataattcagtgtagaaacaccaactttatgtcaaagagtaattggtacatatttaatcagcattcggtgtatttcacacatcgagacatatttgaatatagaaaactatgattgagattaatttacaaatactttttaatcacgtaaaattaagcccgtaaaaattttactcggtgttttgtaaaaagaaagacaaaaaagtagatacagggtacatagtaaacgggtttgacataactttttctttagtatcttattgaagataccgttttggtagtactgtagtagggtgacatatattacatgaaaggaatttttagatcgataaaagagtgctgaataatcaccataaatgtttatttgatttgcaaatgtacttaattaatgtgctaaaagagtgctgtacctagacatagcaataagggaaccatgcctgttgtacacaacaggggggggggggggggggggatcacataataaagacgctggttgtgatcaaatcattacttggaatgtgtttgacccctttagatttattatgactcagcatgtaagaaaattgctgatagagaccacggacaatgatggggccatactagtcgagttctaggcatattttgccctctcacgtgtcatgatgagcctttatgtgagtgcttttgatcagttgagggggatcacacccacatggttattacaatatactattacaacttttacttcagctccatggagagtgacgaattaagacttaagagatgcatcatgcaattgaagaagaacaagaaagaacattttataaaaaatacaagttattcagtgaaaggctagtttttgggaactgatttttgtgttaagccatgagaatgtttttcattgatcccttaaattatagttgtactttatggagtctaaaagttaacaatttgatttcgtatcatgttcagtgctgctggaggaccaaatacaccaaccacaacccctccaatgaacaacccaaatgtgccaacgtctaccacatcaccaatctttggtgggggcaacactggtggactaactcctggaatgagcactccattccctgacagttctagagcacattcagaagcaacagccacatggtttttagcttttttttcctctcttattatattcattatctcttagcctatgtaagatcttgggccaggcttacagttttgtcagaagttgaaaggctccctttggttgtttataaccttattttatgcaactacctcttgcaccgccactattttaatgtataaggttatgaacaagttaagcatggcaaacatggtttattcaggaaagagcagagctagattgtatcaaggcctttactatagggctcaaatttaattcaatagttcaatttaattgttctccttgcaaacattattatgttttacaaatagtgcaatatcgttagcttatataattttctttttgtgttttttcatgtcagttttttctttcgattgcattatccttttatagcacaatcatttgggagtgtgtttcttgttagcaaaaacattaaataaactattgctaacacatcttgatgagaacgtaaaagagaagcatgatataagataaaggatgatacaagacaagtattcaaggtgtgagaaagacatgctcttttgtatatttagactattacagttaattcaatgcttctgatttagaaattttagacatattttgattatttcctgaaaaaatttaatttctttattcaaagaaaaaaacaatatattttatttgaaattcttacaatttaagattctttagaattataaaaccctccaaatacaggatcaatgaatttatatacttcatgtaatctttacgaaattgaattcttattaatattaaatttaaatcatttattttattattagtataaaatattatgtaattataatacaaaatcgtcttaccactaattactaatgaaagaaaaattacaactttttaccattgatttttaagttctcacaaaaaatttaatacattacttttgtataatacatcaataaaaaattaattattttctaaactttcaaattagttgaatattaattgagcaagatgcataaagtcattataaattttttgatttcattttttcaaataaaaaaatatgtatgcttaaactttatgtaagttattgtataaattctgcttaaactgcttcggaaatcctaagcggtcacatgcatcattagatataagatgaagttatgaaacaaatttgtataaacctcattaacttatgagttatgacagccaagtaacaaatctctccatagataccttcgagcataagttaaggtaaataaataacagagtatctctttaataaacaaacggtagcactcagacttcgaaacaagaaactacaattatcgagcctctgattataacagttgcctcatctaaagaactccaaaaaagggattctttattgcagagtctagttcagatccagctgaattcaggaccgccatttcaactttgtccctaggcaaaaacaaaaactcaccaccatcgatcttctcaaacccacaaatttctagaaattcaatgccccctctcaaggaaccaactctgtcctgtaaaacacacccaacataaacacagacttaccataaatatatcgtatttaaatgatctagtggtaggttagtattgaaaacccaactttcgtttagacaagagaaagatggggccatatacctgaaaagattggttactaagacgtatcttcctgaacttttcctcatcgggatttctggcaacattccctacataagttagaagagtttggaatgctctcttcactctggcgtcatcctcctgctccaagaataagtgaacatgtaaataggctaaggtatcacaatatttaagcagaagatacttttaacaagcaatttttgagaagcattgatgtgaggtaagtaatcaaattcctttagcagaatgtaaaatgcagttaacattatcactactgtatataaaaaaatggcctcattttccagattgcatggcacgtggtatacagtatacttctctggccatccaaaataaaagcactagaaatcaaaaagaaaataattgaaatcatatcaagaagttgatgataagagaatataaatttggtccttcaaaaagataatgcaaccaaattgacccctttgagaagcataaaggtaatatatgaagctaaaagaagtttcttaaagaagcataaaaataataaaattcttttcttggcttctgaaaaaaacgtaatattctttcaaaagccaaggtaggccagttgtccctcatgaacacaaaaaggttatgcaattgcacttgcagtaagaacctaaatagaaagattcaaggggcaaaacttttttggatgtaaagctatctgcataatttgtaataaaatatattatttagcatcaactgattgaggttgctatggtacctcttatgctattaccattagatgttcaattgataccggttcattaactatcgaatagttattaatactgtcgactaaacaggtcccggagttccccaagaatgtaccttgtggttctgcttgagagaacggaggcactccctcatttgctcagcttttgtggcaggcctaacaggcacaaaactctgcaagcacaaatttcaaataagcatgcatgtagctggggaaaaaaaatgaaaccattatttttggccaagctcatacctttttctcctccacaacaggtgcaggtgaaggtttggctgctgagagttcctctggaggcaatccaagtctccgccttctttctgcctgtcataatagagaaacaaattgacttcattcaaatctcccaataaaagatattcaattttccattccatcttttgaaagaaaagactcatcgtactcctcaagtcttcctaaaaacttgggactaaagtcctctaaagctactgtagccataaaagtagtagtagcaggctccaaaaattgtttttctttgccaaaaaaattgttcaaaatgcatatttaatttgatcagcaatgacactaagtagactgtcattttctaaatgggttcttctggtataacatatatggaaatatgcattgcggaaactttcattgagcacaaaacattttgttctgcacttgatattccgagttagtgcagtgcccaaatcattaatttcttccattaaaacaataaaattggcaaaacagaaattagccttttcacaaaacttctttgaagtataattcattcatatgcagattgcagaacacaagatttgtgggttggaggataattctaccattttgatctaacctataattcaaataagctaatgccaagcggaatgcagttccaaaatgaaaccaatattgtcaaccaattcaaaacaatataaatctatcagatctaaatatattttatcccaaagtacggtcttttattcattttagacaaccatgcatagcaaatggtggcttatctttcaatatctttattaaatacacaacctgaattaatgtcccacacttctatgtattgtgatcttttaccagagactgagagaataagttaaacaactatgttttcaaagtaaatgatcttgatggaaaatgaaaacaaatctcaaaaagtattatcagtatccaactacagccagatggcaaaaaaataggatttaatgcacataaggtatttggtgttcatattataattctaaatagaggtcagggacacagatttaagtatttggcgttcatattctaattctaaatagaggtcagggacacagatttaagcatttggcattcatattctaattataattctaattaaaaaccacttatatgatctgactcttgagtcagataagaacaggctcgataaaagaacaagacagagcaaaatggttaagaaatgttggaaccttgtcttcttccaacttttgtttgattttctccctagcccttttctcttcctctttctctgcttttctcaaggccaacaacctgcaagaggaagcaaatttttcttgtagctgagtgcattcaaaacaaaacacaagatgtgtgacaacaaatttactagcttagcccgaccgtttcctctcattctcttcttcaatccgctttgcttccagcaactccttgccaatgcgaattctctcctgcattaaatacatgacagataagaaaatgaagatccaaagtaattaacaaatatggacaaaagtatcaagaaatactatattacaatgttataaactggtccgacctaagaacatatatacaacaaaaattaacccatgaatttttcaagataactaaagagatattgctactttggaacacagtacagatacatggcagcttgaatatcataaaatgaaaaaacacacacaaatcagagtaactagactgtataagagcagaaaaattagtctaaaagatgtccaacattttaagccaataaccaattaaagatgacctgatttatatgtgaagcttttttccctcttttagcatatcttttgtgaagtcttgagattcttcaaacaaattacataggctttaagcattggctcttctatttctgatattgagttcaattaatttcaatagtttaatttcacaataacctttggagatacttaaaggttattgtgaaatcaactctaatgatttgtcttttactagataataaccagggtgacaaaaccaatgaattcatgaaaccttcatggacacacaaatgggcaagaccacaagagagagagagagagttcttaaacaatgcaggagtaatgagttaaaattggactttgaatgattcgcccacgaattaggttgtgatgaaattcttggtctgagtcaaggagatgtgaaaatagctaataggaaaagattaatatgaattgaggggaatgcaaactagattcactaaaactgctttgaatagttgtgttacaacttaaaaaacgcaggcattatacatctataataagactatggagcatggacctgtttggactttggattacacttctaccaaccccaactggtgttgggcatcttccaaaagtatcttattttctgtgcctgggcacattttatcttttccaaaatctaaaacaaaggggtcataaaactactaccaaaaccctcaaaccaccttagatacaatttacaaaacaagaaaacaataaaacttcccaaaatactattaacagcctagaattatttttttttacatttactaacgtgaacttcaattcaagaatatactaatacacagatgactgagatgaggtaatctattacttttaatcaacctaaactttaccatgttacaggaacaacaattcatttacaatatagactttgatataattaaaaacaataattgacaaacaaaaaaaattattgatttttgaagcaatactacatcatgtgctgaggaccaactctcccaaaagcttaagctattaagtggaggctcataaatgattttatatctctaacatgcccctcagaagagtcatttgggcttgcaatgtcactaacaagctcactctatcttgctctgaaattcaacctttgaccaggtgaggcaaagcaacaagtatggaacccttccataatggattttaaatacatgtgtatatcagtaatgaaagtcacaagaaataagtgagaatcaaatggatgaatctgcaatataccttttctctttctctctccattctcttctcttcctcttctttcttcttacgagctctctcccttgagattatagtttaaaaaatcaatgattacatagactacaaatataccagtaataataaatcggcttaaaagtaagcacacgtaaactatagttctggacacatgtaggcatgtattaaactacaaattttcaaaaacttcatatgacaatatcaactgagcaaaagttcagaaggccagaacacaatgcattgacacgaatttggctaacattaatactgttatatattaatggcatgtacataacttgcacacaatgatagaggacaaagaaatatgcagacacatttctaatctctaacagttaacaacttcaagacttataaatcagggtgcaatacccaatgatattaatattaggtgttcacttaatcagcctatggtactgacaaaaataccagaatgcatcaactgtttcctttagaggtcaggtgaaagcagaatagggattaccctaggtcatcatcatacattacttctatcaaatgaatcaatacatatctaaaattattctctagaactttgtccataacaatattaaaactctaaaatagcttcataacttcgccctttagtatgaatgttatctgaattcagttttataccttagttcctgctgtttggccttcaattcttctggggtaagcgaaggtttaggagcctcaattttggtgttggcaggtacctgagtgaatcattaatcagcaggttagaaactagagtgtgacttaattacactgaatgcattttaagatttgttcataatatgaactagtcttatttttgttgaagtttgcaacatcagatctattactcatgaagtaataagcagttaagcacataatgacaataagtgatattaaaatataaatattgtaccaagggcatctgatctatgtcaggatcattctcatgctctactatccaatttacggcagactcaaggccagcattacctgtagaagggagaaccaggtttaatatctagagactcaataattatcaatgtccagatataaataacattaatggtgtattgaaaataccctttaaattgactactcatgtatcctagatccaaagactgtcatccgtaaataaggaaactaagatttacgtctaataagttttaaatcaaatttgccatcatatataaatattataaactttgaataaacaagtccctttcctggctatattgtactcacttctctctgttaacccaccctaatttccaacaatatcataaagtttccttcaaaaaagcaaaaatagatgctctgtgatacaataatgattaatggatacaaatatcaatatttttttaaaaaaatacgccaaaaatatttcatgaacgtccaagaatgtcctgtgacaaaaagcactattagaacaaatggtaattacttaggtataaatgaaacagctaacatactccataaatgtcccatgaagcattaataactacagttctctattccacgaactatccaataaaaataaaaacgtaattttcaagacagaacaatgttgttaaatggcacagccatggtcaccatggcagattggcaaccgctataagcaacttgtaaagggaggcctgcttttcggcgccatgggcgtgtttatatggtaggatttggccttttgccattgataacacttggacagacagaaaaagtaaaaaaaaaacaataacaatcaagccttatcacactaggtgggatcagctccacgatcaatcaacacactagacctaggctctattgcaaatcatattttcaataaaacacttcagggcaaggtaaactaaattggttcttcctctatttcttttacttggaccatcctccgtttgatccacttaaactacacaagcctctattggtcttctcacattttttttatcagcaaagataatattatatatatatatatatatatatatatatatatataataaagatgagtacaagtagtactgagaaagaaaaacacccccagggagcctaccagaactttggcaacctaatacatggtaacagcccgaattaaggtgccaaaggtcaacctaatagtaagctcacctgaagggtctcacatgagacagcaaaaaacaagtaagaagaaaaaaaatgcagaaataagagaatatctctatcttgaacccgtaaagaacactacacaactatggtcaataacaaaagaataggactgcatgtaaattcaccagagtaatgaagcgcccgtgttgcccgtgctgttgaaaaccccatggattcaagttcctcgagcagcttcttgtccacttcgggaacaaccatttctgcagtttacaacataaatcacaatcaggcaaaaatacaaaataaaactacatcaccattaaccactgagcttataaaccattttaggtttaattattcgtttggtccctatacctacacaatctttccgttttagttcttacacctaaaactactaccagttttaatccttatgcatacactttttaatcagttttagttcctggcatccaaagatcgtagggattaaaacagattaaaaaatgtatatgtaagaactaataagagttaaaaagtgtatgtattggaactaaaacgaataattcgaggtatagagactaaactgcaaagattatgcaggtatgataaccaaacgagtaattacgtccttattttatagattaacaatcatagattaggaatattaaattttaattaactaaacttaaaaacaaaaattaccttcactttggtcagtggatgcagcagcggaagggttttccgacgaagcagttgcatccaccttcggagcctccaaactaatcggtttgacggcctcggaagtcttgtcaacgaactcggtgtggccggttcttttcgtgtgcaaatcactctcctatgttcgtgatccaaccaacagtaacatattcagttaataataataatatattaataaaaggaaattgcggtattgaaccctaaaatgagaatcgggaaatgttgatcggagagagtgggactgacggttttggatcggcagggtttggagcaaacggagcagacgaggttgagaaccggttcggtggattcggagaagttggagtgggaagtgagttcggcgtgctcttgcgcttcttctacggttctcaacagagcaccgcagtcaccgcacttgagagaaacgcctgccattgattctgatgcagcaaacgcagtgcaagtaacaaatttcaacaattggatttatattttgaccaatcagcagcacctacgacgactgcttgcccttgctttctcaggagtaaagtggagatgcaacaacaccgctaacaaattattattaatttatcattattattcgtcctaaaaaattattttagacgttaaaaaatttcaaatatatattttattttcaaaatttatatatctttctaacaataatatcaactgaacgatttaatttaatttcttatctattttaatttattattttttaaatctttaattctaactttattttgaatatttcttaaaagaaattattaatgattaataataacaatatgtcagaatataaattatttataataaatttaaaatataatttatatgttaaaaaatatttattttttataaattttatttataatatgatttaaatattataaattataattttaaattataaaaatatttatcatgtgcaaggctaaaatactggttattctaatttataaagagaaaattgatgtatttatcgtctacttttccttcttaaattacccttgtgattactaacattatttcacaatttagtaacttagtttttttaatttgttcctacagttttaatatatatatatatatatatatagtttttttaatctgttcctactgttttaatatatatatatatatatatattaattttggttcacctattaacccatccaatatttaatggaaacatgctaaaatgttttcttactagtaggaaaacatgaaaagaaaaagaaaagagaagtcaaattctcaccatggagatgtctgctacatcgattaagcatgtgtatgagttagggacaaaattctcaattttgcaaaggcaaaaaagatgatgatttgtcaagctagtccgcatatgagttgcttgctcgataaatatgttggaataaaagctaccgatcatatgaaatgtactcctcaatttcgcatatgaaaatctcgttgcagatgaaaataaataccatccttgagaaagagctcaaatgaagttttttttaatctatacacacttatttcaccacatatttaatctttgagaaagacaatcaaaaccctcatcaccacttatttcaccattctgaaaacctctcttaacttccttaatgagtttctctcaggcccaagcctttatttttggggaaaaaatcctaacacagcagttagataaactttgagcttaattaaaggtcttcaagaagtgattataacaatatcttttctaaattttcatggaatgaatttagtggatgtgattttattaagggttattgataagaaaatgttggaatttttgtgcaacccaattgttgtttttcatttagttatttattgaggaatgcaatttcctctaaagtgtatttgaataaagaattttaagtgaggaaagtaatttattagaaaatttaaaatattttaatctaaaattcattgtttttatgtttttatatgaaaaattgaaatttttgaaattttaaaacataattttaaataactaaaaatgtagaattttaattttcttctaaaacatgagaaattgaaattatcttttgtcgctgacgtccccagcgccaccgaaaggacctgacgttgctgcagcgggacaccaacttggcagtgccacttactctcccccattgacggcagtgacggcgcaacatgtgatcccgttctcagatggtccactacaccagcggacgcgtgtacgcgcttatatggtcaccacgaggagtcagtgcagtggtagatcctccatgacatggatgatccaaatgtgatgaagtgccacgaaatatactatcagaatagcgaaatccaagtgttgctggagttcatggacgaaaggtcgttggaggggaaacacttcctgcaagagcaacagttagcagatttgtcttagcaagattctgcagggactgatatacctgcatcgacagcacattgtgcctagggacatcaagcccttgaatctactgataaactcacagaagcatgtgaagatcgctgacttcgaagtgggtcgaattctgaattagacgaaattttgaaaatgaaaaaatttaatttctttatccaaacactaaattttgaaaatgaaaaaaattcaattgaagcatttgaaattcttagaattaaaaattctttagaattttaaattgtctcatccaaacatactcctaaggttttcataagaattttcaggattttaaggtgaacttttttgtgtgttgaaatccaattcttcattgtttttcttgatgagaattttagcatgataagatttgagaatctaattgataattactaaaaattatgtatttttgttattttaagggtcagtcattaccttttgagaaaaaatgataaatatatattaaattcttggaattaaatgaaggatattaccattcaggatgaaatatttatgacttaaatgtgtttttagtccttcaaagttaagtcattttttaatcgttcaaattcaaagttgatttttttagtccttgaaatccataaaatgttatttttagtcattttgtatagcacgagcctaacatagaataagaaaaatgcaatttgtgacaacttttgacaccaaaatttgattttgttttgtattttaaagtatacttttggtggttaaaaactgccataatcaagttagtaaaaaaatataaattgcttgaaatttttttattaacttgattttgaccatgccaaatcatgtcaaaaattgtgagtctcttattttctgtttggtttacattttacacaaggacaaaaataatattttgtgtattctaggactaaaaaagtaacttcaaatttggcgaattaaaaagaaaatgactcacattcgagtgactaaaaaacatatttatgccaatatatctgaatgagatgagttacctccattttggatggaaaaagttattggatgttgttggatataggctaatgtaccttagtataattgggtttcacaatgagtttagatgtgtgaatttggatgtctctcattgctttaagtgtgaacctgcacaagttaaatttggtagcgaccttaggtagttaattacaagaaataaaacttttaaaaaagatttgcaatctcttgtgaactaatagagttgtactttattgactgatagtataattttattgaagaaagggatcattgttcctaaggaggaaaatgttggggaaattttctagaagaaactcataagaggaaattcatcatacactcaggggtcatcgagagatattaagatttgaagaggatgtattagtgaccatcaataaaagaaaatactattatataattattattttttcttttatcttatttcttttttttttcttttaatttatctgtatttattattaggttcatctatcacttatcccaattaacttaggttaaagtagttgttgatattgatgttgttgataattaactttgtatctaggtgtctagtattcacgaaggataagcactagctcttcttcatgcgataaagtgggcttaggaactgcatttcaataaagtggttatcgaaatagattggcaacaatagtcttaagtatcagttgtcagaagatgaagttgaatgagtttgataacatcatcaatatttgcaaaacattgctaagttctaaactagactacaaagtttattttattcaaaagcaagctaatccagtgactccagttgtctagggcatctagagattttgctggccttcaagtgtatcatacttatcctatttgtatggtactttttgtcaaaatgatgttgacatcgttatcattgaaataatggtgattttatttacaaatagtaacagttaaaaatcgccgctatatatttttcttatttacaatataaacatgaaaatatttcgaaacgagcaacacaccaccgcacaccccaatcactacgacccatcgccgccaccccaattgccactaaccaccaacctccaatataacgtgaatttgtccccacaaccgcaaactaccttgcacgacccacaaccactaccagcatacacaaagccaccaaccagccatacactaagtgaagaagtgcaatggagcatgacaccaagaggcttgatatgcaccataaaaatcacaagatttggcagtggttgtggtcggggttgagatctggctgcacctcgtaccatcgatggtgatcgcacacaaatggagtgacatttctgtagtttgcaactgaggggaagaacattgtagagtgtggacggaggagggaggagctaagtgctgatattttttctgtggtttttttttttttaaaatatagtgataatttttaatcgtcactattggtaaataaaatcatcgaattttaacgacatcaatttgatggaaataatgaaattgatatatttttaagaatttgaggatctaattagaacttaaatttttttggaaattaaattaaataatttggaaaccaaaacctttttgtaaaagaaagtatgttaagaacaatatatttaagagtataatgctgaattttttcataatcactttccctaccgttgcatagaatccatttcctcacttttgtgatactagaaaaatccaaatacgcgagggaccaaatgtacaaaggcaaaaaaagtaccgcgcatgtttcccacgtgtccactatttcgcgggcataataaaaaaagcctaacttttgcaacattcattatcgaggaccaagacgcgattttccttctctgccgtcattttcccaagaaaatcagaagaggggtcgatgatgaggttgagacgctgatcactcactcactcgaagacgatggtgagttcgatccgcgatggaaccaagccagattctgtcattgcggaccaccacaactgatcctgatcatgtgaaggtcattcagtgggacgacttccagcacgatcttgcaaggttggcgagtctctcttccgccctccacgaagccaacgagaggaaacggaatcttcagcacaagctcgattccctaattcaggtagggttttagttttagttttggttttaggtttagccattgcaaaatgccgaaactgggtttatgatgacgatgttatcctgcgtttcttgagttacggaaattgtgtttgcgcttttgacgagtttactgtaatgaatgaaaagttaaatggaaatgaagttggaatttagtggctggagggaaagcgcgtttggtctcgtggaaaatgcgagcttgagtggggaatcgtatcgcgttctgtgtttgattacgaaaattcttggcggaaggaaatagaattggggaagggagacgaatataattgcatttatttattttgtttattactaattactcgttgcctgtttgcgaaatagggttcaccttataagcggatacatcgatttatgcctatgctgttttattacgattttgttttcggattgtggtttttaagttggtgagcaagagacttcaaatctcgatcactgtttagtgggttgaagtttattatggttggactggatgatctcttctctctctctctctctttgttcttggtaatagtaagcgtatgtttggaaatccgttggtggggtgctgtgcttaagttggtggaaggaaccccttcatatcttttgggttgaagtgtttgaaatttgtttccaaacgtactggaagttaagggggagggaatgtatgtgtttggttctggttattttggaaaaaaataatctccctatgtcagcttccgtagagaacttttgaaaaaaaagctattattttcttggaaaaatttggaaccaaacatgtgtgtaactccaaggccaaggcacgctaaaggtcttgatgatgattcaaggtgattttcatgcttgtgtgtatgtttggggcagggggggataggagattgacctaagccttaccatggactgtggtgttcaggttttgggctgtggtgtttgagttcgttgctggggggctttaatgtccatcactgtgtaatgggaaatgatgggattgatttttgttgtatttatcataaattaaaagcaaactatttattttctttttgtattacttgtggcccatttgggctctccttataagcctattcaatatattaaccaacctagaaacctcttggaaaggaaacaccagcaaaatctgcctttaaggcattaccagggaagtcagaaatacatgataagttggtttttgattgtggtatttgagtttataatggttggactggctgatctctcatttctcttttctgtatatggtaatagaaagcttggggggggggggggggtggtaattgtaggtgtttggcaccacttattttggaaaaataatctgttttttgccagcttctgtaaagaacttttgataacaaagtgattattttctcagaaaaaatgggatccaaatgtgtgttaattccactgccaaggcatgctaaagtccttaatgatggtttatagtgatttttgctcgcaggtgtgtttagggtagaggggattgtggttattttttggttttggacagtggtgtttgagttcattgctgagaagctttaagtccatcactatctaatcggaaattgggggattgagttcgttgcgttatatcataaattagaagcaaattgtttattttcttatttattagtggctcattttccatttagggtttaagcagatccttcggttcacaactaggctattttattacttttttggttttggattgtaatgtttaagttggtagctgagaggggcttcaaattcaatcattttacacatcctactattttccatgatactacggatttattagcaaagaggcggagaaatagattaattattccatttcaattccaatcgattcaagaacgagacaaagagctaatgttagcttccagtaggagggttgaggtttattatgattggactggatgatctttcatctctctttttgttcttggtaatagaaagttaaggaggaagaaaatgtacatgtttgttcagcttgttttggaaaaatagtctcttttttgccggcttccataaagaacttttgattacagtgcggttattttctctggaaaaattgggaccaaatgtgtataattccaagggcaacacattttttttatttatttatttgggggtgggggcagggattgaacctaagccttacaatggactgtgatctgttggttttgggtagtggtgtttgagttcattagcgagagacttggaagcacacatcactatctaatagggctgaggtgtattgtggttggaccagttgatctctaatttttcattgttttgggtaacaaaaaaaaagttaagttgggggagggtatgggccggggtacctcacttctttttgttttctttttttttttttgggggggggggggggtggacctaagccttacaaacgtggctttgatccttattaactaaatcaatctttgttggcttcatttctttgtcaataattagttaatatggatctacaatacacttgtttctgttggtaattatgcttttaaattttaccttttggccttgtcagtttttttttgaaagccttgtcagtggtaactggaaaggtctgtggacagagattggagagtcatgttaagatgacgtgtgttttcagtctgtttctttacctttgattacttatgaacacattatctctgactaggcactttcttttgtcctagtataaatatttattacttaatcttcctctttatcagaataaggagaaagaactacataactttgattataaattatagtatgaggcatatttacctttttttggagaggatttaagagaaataattttctgatgatcaaacatatgattttacactgatcatttcatgttttaaattttatcagtgggtctgagtaggtgtacaatcattagtgtgccatgaattttttctgttgcatatcttggatcttaactggttaatgtgtccaatatgagtagatccatgatatctgaacaaagggaaatgcttgattcccaaattccaactcagaatagcctgcaaagcgtaatagtcagtcacgctatagtggtgtcgtggaatgtcatgtctatggcctgctccaaggaagcctgtcatgtcgcaactcaccgttgtgcctggagtggcatgaattccggttgtcattgcatcaaagacgaaaccccctttttgcccccttgaacaatgtcatttggtgctgtttatgaggggcaatcttgggatttttccccctccccctcttatatttgatcagaacacaaactatttcccactttcactcctttctaaggttaaataacacattactctcattaatctcttctctcttcaacgcaaaccatcttacactgagctctcaactgcattgctggccaaaccgtagcactctggagtttccagccaacccacaacctgtggaactctggcacaccattctgtggtttctacttggttcacatcctttgcaatctgttctgttcacatcaaagggggtggtctcttctctcttcgttgtaaaccatctgaccgaaagctctcaactgcgtttccagccaactaacaatctgtggaactctcattctgtgggtatatttttttagcgcgcgtgcacatacttgcacattgttttaatttataattatatcaataaattttgtaatagtagtcatcccactatctgctatcttgctgtggccgttttggggttggttgctctgtgccgttatcccagattgataaccatgctgctaagattttattttagcacaccaattcagtcttgtcagggtattgagtggtttagtttttgtttacaccttgggatgcttttttgcactaattgtttccaatatataggtgcatggttggttttttgtttttttactggtccctaattaatgagcccgcctaacaggtcaatgctgaatcattgggttggttgaatgaacttgaggagatgcgtcaaaaattggaatcaaagaaaatggtgatggagaatatgtctatacgttctaggctggcaaaggaggaagctagcaagcaggaggagcagcttagtggtgcagtgcaatcacttttggtggcagggggtactctttctgtaaccagcagaaatctccaggtgagtttatgtcatattgtagttgaattttcatataatatcttttctttcctggaaataattattaaatgtaaaaagttcagtagttctagggggaatgcattgttttttttgaccagcaaaaataatatgtatatatatatgaaaaagtttctgcattacaagaggtattgcaaaaagaacctagtgttcaacagaacgaaggaggtttaaaccatgaaggcatggaaaagacctcctgagttctgacctataactaggataacaaaaaatacagcttaaaactaccctcccctgataacaaaagcctctcccatattagaggaccagaagtggaaagggaaagtaaagccatcctccaaatgtttaagccaagaccaacataaaaaaagcgcatcctccatcagattttgactgttgaacgtcgcagcatggaagataatcctattcctatgacgccatatagtccaggtcaatgcaacccaccaggtctgccatctcatcgatctaattccaatattcccataggaggagtgttgggtgaagtgctctataggggttgctgacgatacacttacgacctttatccacgacaagcattcccaccagagaggtatgatcctactgcagctgaagaataagtgggatacgtcctcctcactatttctacaaaaggggcaggtgttatcaataatttccatattccttctacacaggttcatcttagaaggtaacctatccttgcacaatctccatacaaagcatagtgccttattaggaacttttaatttccataacaccttgaagaaactctcatgaggcaaactattcagttctctgtcgatgtagtggtaggcacttcccactgtataacttccactcaaatcagccgcccatctccaagtgtcttgttgctgtaagtgtattaccacatgttgaatgtccttcatgaaatttacagcagcagcaacttccccctccatgaaatgtcttctccagctgagctcccattcccatccgtcttgagtcattttgcccatctgatgaatgaaaaattgttgttgattagaaagctggtacaatcttgggtacctttccatcagggtgattccatcatttttccatccgtcctcccaaaataaaatcctgtttccacttcccaccttccagctaatcccacttctaatccagtgcctctcatcattattacacaatgagctgagatccctccaccaaatggactctttaccattccttgtaatttcagtcaagcttctccatcccccatattttgattgtaacacttgtgcccatagtagctgtggctggtgaaaaagattccagaaccatttaccaagtaagggcttgattaaatttggttaaatctttaatgcccagccccccatgctcctttgattggcagatcagcccccatctaacccaggcaatcttcctttgctcatcagttccaccccacaaaaaccttttctgaatcctctcaatgcaagctatgaccttcttaggcgccctgaaaaaaggcaaaaggaaaataggaatcgagtttaacgtagactttatcaaggtcacccttcccccaaaagagaaatatttctgtttccatctagctaattttcgctcgtattttttaatcaagggttcccacgtctcaagacgtcttgggttggctccaataggaattccaaggtatgaaaaagggaaaaccagccttctacagttcagatatgttgcagcttgagttatccactgatcatccctaccaaaaaccccaaatctgctctttgcgaaattaatcttcagccccgataccatctcgaaggtcctcaacatcaccttaatggccttcacatttttggttgatgcagtaccaaaaaacaaggtatcatcagcatactgcaacaggctgatatcaactccgtttctccccaccttatagccatcaaacaggttttttgcctgtgcctctctcatcaatccagtcaagccctctgccacaatattaaacagtagtggggcaagtgggtcaccttgtctaaggcccttttgaggtgtgaattctgcagaggggcttccatttaccagcactgatatggaagcagattttaaacacccctcgatccacataatccacctaggacagaaacccatcctcttcatcatatatgacaggaatgtccaactaactgagtcatatgccttttcaaaatccaccttgaacacaagacagcttctatttgatctttttgcctcatctactacctcattagctatgagaacactatgcagcagctgtctcccttgaataaaagctgattgtcgttggtcaataatagatggcatcacctttttcagccttgcagctaacaccttggccacaaccttatagacacagcccactagtgaaataggtctgaaaacatttaggccctgtggatcatgtgtcttgggaattaaagttataaaagatgcattaccacccttagggattgtaccatttacatagaattcatccatgaaacggagaaaatcggctttgatgatatcccaaaaagctttaataaacttgaaattaaagccatccggcccaggactcttttcgttaccacactcccacacagctttcctgacttccattgcatcaaatcttgccaccaaactgtccaagttgtgttgttcaatggcactgaagttagtgccatctaaattaggtctgtttagaatgggctcctcaaatttcttcttgcagaacatcctaacttcttctttgactctgtgaggctcatcagtccagctcccgtcagccaccaagcctctgatcatgttactattgcgcttccaatttacagtcatgtgaaagtaagtagagttgcagtcccccaccttgatccacttggatcttgctttctgcctcaagattgaggcatttgtctgagcagcggtccataattcctcctgtaactgttttcgcctcagcacctcatcttcagtaaaatgcctgtcatccccttcagtctccagcttgttaagttctgactgtagtgattcaatcttcagctgcatgtctccaaaatgtgttttgtgccagaccttaattttctgcttcatgttcttaagcttttcctttaaaacaaaaccaccccagccactgatctgctttgaattccacccttcctgcacaagcttcctgaatgtattatcctgaagccagcaatccaaaacccgaaatggttttgggccccaatcagccagcgatgacctcagtataataggacaatgatccgagaaattccgatctagaatgaactgagttgtatcctgccatttagcgatccattctgctgagaccatggctctgtccagcttgcttttggcagacccatttggcctttaccatgtaaagagtcgcccgatacaggggacatcatctacttccatatctgctatccattcattgaactctcttacagtgccttcatcttggtatctctgacatatccctactctctcttgtggtcttctgatgttcttaaagtcccctataatgcaccataaaccccccatatttgtatttctcagctgtcttagatcctcccataaccttcttttcatagataactcacaaggtgagtatatgttgacaattgtggctttgctgccatctgctacccatgtcccttccaaataaataaatccagcccctgaaatcttgttatccaacacaaatgcctccttgctccatatgcatagtaatccaccagccttattgattgctggaagatattcccaattgttatcggcatcaccccacaatgccatgcacaacttagcatcaattatatcttttttggtcacctcacaagggggaatgcattgttgtcttgattaaaaagattgattcattttattgatattgaagtatgtgttacaaattgacatttggagtattgttcttttttgcttttgactgattttattttcaattgaatagagtatatcttccttagctccacttgtacctgtccttcagaaatgaacttcttgttttatttcaaatttcctcattttttaaaagctttcttttctctattagtccatgtaagaaatggtatttgacgaatttatttagctgaatatatatatataagttatcattattccttgttttaggggaagggattattgtttgtattttactggtgttattctagtagctagaaagctgatgatgcttttattataggaatcaagtagatttctgtctgaagaaaatggttatgttcatctgataaaattgcaaaagatgctcaggaagaggcaacaatacatgacatctcaaatttcaatgctctatcctgttaagatcttggttggaccagcacaagagcaagagcttgaagcatatcctttaggcagcctggcaggtaatggttagctcaataatagtcttttttgtgtgtggatagtgcccctaaggtaaaaaaatggcttcggtcatgcaaaatacaaaacttacaatttaaataaggcttaaatatgtttttagtcctttaaatttgggtaattgtttttttagtccttaaaaaatgtttttattagttcctcaaattttcgaaaagctatttttagtccctctatttctttgcattaatggtgtcccaatttgtggcgatttctcatcactagaatttttttaatttaatttattggaaaaatgatttgtgccagtttaaaatcgctagaatatgtaaaaaagcgtcacaattcaacatccatgtttttatttttcttatttaaaataccaaaatatgtaaaaagcggccaacaatccatgagtcaaatattttggcgatttaaaatcgctagaaatggttttttaaaaaattaaattaaaaatatttattttggtggttaaaaactgccacatttgaaaccataaacacaatgaacaaagagggactgaaagtagctttttgaaaatttaagggactaataagtgtttttttgaaggactaaaaaaataattacccaaatatgaaggattaaaaacatatttaagcctttaaataaactaagaaacttgaggtactggatggttcaatcattatcccttaatttcttactggcaccttggatatagttcttctgtaagttgggctgttgtgttgaaaggatgtctttcattctgtacttcgtctgtctgatgtgtgtgcctcatatcttgttcttttctttcatgcttctgcactagttttgctgattgacaacggccttaaattataattttataatttagtttggtactgtagattttggtatggttgatcctttggatgctctagaagaccatagctattcattgaatgttaagtatagtttatcttctgctaatttaaattatcacaatttttttttgctaatattcactgcatttctaagggatatttttgctgaattttattgtaaaagtttcatttatttcattactcagggacttctgctggactaaaaccaattaatcaaggatccttaacaattcatggtctgcatttgaatgtgctatcttttaggaagatgagctttttcactgataaaaaggaaattcagaattctgctacagccctaggatatgttgcacatgtaagtattagaacctacccggcccttttttgcctcagaactgttcatgttattctttcttatgccttttgtgatccatttccaaaatatgtgatgtacagcttctaaattttcatatacatatttggtttaaatacctttttccatcctttactaatatagtggtttctaaattgtcatatacagatcatggtttaaatacatttttttttatgatctttatgatctttataatgtccaaaccttctgttttttggtcttccattacaaaaacactttcatgactaatgggaagagccaaaactaaaaggtttgaatgttaacaaattagaaacataaagttactgggattaaaaccgaaaactagtatatttgaagggacgaagaatgtatttgaagccttcatattttgacatgtcttgtatatggcaaacttaattgtcaatgctttttcgtatcatataccaaacttctgtgttccagctgcagcatttcttattgtagctcaagtggatgatcgttgagctaataattattgaaatgtcttccttttcgaaaatttatttatttattgaaatgttctttactagactgattttctcgcaggctgtttcacttatagcctcttacttgcaagttcctttgcgatatcctttacggttgggtgcttctcattcatatattattgataatgcaccttcaacagagctaacatcttctgaagcttcatcaaatgcaaacataaacgccaaacatgtggaattccctctttttttagaaggtcaagacaccacaagagcagcttatgctgttttcttactaaataaggtatatatttctatttatttttgctttgtagttactctcaatcgttgagtttacgtgctttgtttgaactaaggcaaaacataacaggggtagtcttatcttgttcattgtctccttcagaattcccaagaaaacaatttagtgcatttttttgctgacactttctgccccttatcatttatctaatttatttgtttggatcatggactttttatattcgttgatgactttatgcattaccatattttgcaagattgccggatctgtgttttgcttttgcatggttagagtttacttcccatttgtttcacgtaattagctttctggctatgatttttgtgttgctttttgtaagagaaagtattctactttttttgggactctactcaaaatttccaacatgttggttgattaagaaattattttggccttgcttgtgcttttctctgtaatgaaaagagactgaattggcagatttccattttactatgagaataaagcttactactgtatatgttagctaactggaagtgaggacgggtcctcctccagaattagtttttttttttttttttctattttttgttttcccaactctttgtttgaaatttgatttttcaaaagtgagcaattcacttaagagggcagagtaacaaatctcagttgtcaatgagaaaatcaagagtcaatatcgcatgcacatgcataaccaattggggatgtattggaatattgaccgttgcttttttatttatttatactcaacagctgagattacttactccagaggagccaaatgcctttgttcgtttcatggcatgaaagattagaagtttgttttttagttatgcttacatgagatgctttaattctaagaaacatctgtttaaaaactcatctcttgtttttcccccaaagatttcctcctaccaaaaaacaaaactatgattgttctgcagttgaatttccattgtcaagaaatcatcaccattaaaaatgcattacatacactgaaaaataaaataagttgcaccttacaacattttagaccatttgattttaactgcaggaccctgcagtttacaaacaactgtaggtgatcctgttcccaaaattgagtagcaagattaacatttactatattgacaggctgttggttttgcattggtgttggctggcaggttgtcttagacttttaattctatattatatctcaaatatggtctcccatacttgttagtgcctttgttttctgtcattaatttttttcttgaagtacataggcaacatgaacataaaataggggtaacagaaatgaggatgttaaggtggatgtgtggatatacaaagatggataagataagaaatgaagatatttggcgaaaggtagcaatagtactggtgagtgaaaagatgagggaatatagactgcggtggtttagacccataatgagacggcctctgaacaaaagtttgttatcaagaacttgacacaaagagaggtagaggtagaccgaaacttacatgagaaaaagtagttaaacaagacttaatggagtgagatataaattggcggacggtgtgtcttaggacgaaatgaggaaaaattataatcttggtggagggttagactcatcgttatctctatatttcagatggtccctttttagcctttttcctcttcatctctcccctctttctttcccccttcttttcttttatcgtattttcccttccgcttccacttttttttgaacctctttgtatctatcattggattcatctaccatcaattccaattaacttggattaaaggtattattgatgttgatgttgattttttttttgaagtgtggttgtttgaacgatatttgatatatattgtactgtgtacacattatccgtcctgattaaccttgacttacagctcctttccctcgtgcttttctgactgtaggatttagaacagcttttgaatttcgttgatgccaagagtttgggaccacgccatgtattggctaatttgagagagcttttaaggactatctagtcttcagctttaatagacaaattgatctagtagtattttttctctattgtaacttccttgtaaattgattttttttaaattcttgtccgggtgcaatttttttggtgcaccttccattgtagcattgtgatcaaaatggagtcaaactttctataatggatttggtattctttgaaaaaagagagtatacaccactgtcaaaaatatattctttgagaagaacataaatgtcatacattcctgcaagcatatcatgtataaggcaacttttggaggaatacataacattttgcgaaatcaaggatgaaatccctgttcggatgggaaacggtgatgtaaggatttatcgaattttgttgattttagtacgtgatgtgattagtttatttttcagtttcttcattgattgattttgtatatataatatttgtgtgtcaaaaggcttttctggaatgtgccgcacatagaaattgatttcctggaatctgcgcctttgttgtaaggtaccaactaataatgttttagggtgtgtttggacttctattgagaggatttaaaagtatctttgagagtataatttggagtcatgtttagttattctctaacaatatatttgagttaaattttttgcttggaaacttaattttggaaaaacaagactttaaatatttttgtaaatttactttgcaaacttaaagttgacccaaacttatgtttataaattttaattaaacatgcacttaaacaatccatctctctctagggtgctattcaaggtaaatcagaagataggagaaaggctgtcaatattttgtttcagttttcttaaaatttaaacataatggtaagtgaataataatgtaaaaatctaaaaattttcttcttactaaatttacacggtaatacttactatacttctaatttaaatagaaatccaaaatttgccgttttcttatactatttttgaattaaatgtcataattttttttacaatttcatattttttttacattgaagttgtaaaatattttacaattttgattttttttagttacgactttaaagtcataaaggagtttttttattgaagtcgtaaattaatttatgattttaattttttttaaatcgtaaataatttctattttaatatttaaagaattaatgtatattttatttttttagatttatttaatatttttatatttttatgattttatttaatattttttatatcgttttatttattttgtaaattaaaacttcaatttaaataaaaatattaaaacatattaaatatttgttaaacaaaaatattaaaatattttattgttaacattaaccaataatattcacttataatttatcaaataatattaattttttaaaaaatttaactaatttttacaattttcattaaataaattaataattttgtataataatattaattttattttataaattattttaatattaataataaaaaataatttaataataaaagtagttattaaaataaaaaataatctaatacataaatataaaataaacaatacaaatttttaatttacaaaaaagataataatccattataataataaagaatataaaatattaaattgaaaaaatatatttaataaaacaatataaaaaatagaaatattaccttatttaaaatataaaaaatgtattaaataaaataatatagaaaaaataagaaaatattaaataaaatcatataaaaatatagaaaatatattaaataaaataatattaaaaatattgaataaaatcatataaaaaaatatagaaaatattaaataaaattaaaaaagaaagcatacattaattcattaaataattaaaataaaaattatatataatttttttaacaattgaagtgattaatttatgacttcaataaaaaaaatattatcctttatgattttaatgtcataaaaaaaacttaaaccacattaaagtcgtaattaaaaaaattaaaatcataaaatattttatgacttcaatgtaaaaaaaatgatattataacaaatgttacgatttttaatttagaaattataatatatgctatgaattatccaaaaattgatgttagattaaaatttgtcccaaatggtaaaatttttttaaaattttcccttttggtactttggccaagaaattgagagagcttataattaatgagaggtcagtttcagcactacatttaatttagtaggcttgtagcttgttgcatcagaaatctaaagaaggaaagctatcatgctgtcataaagagaatcaatttcctcagcagcaatgtattgtcaccaccttatgaaaagcaagagcagtagtgaaattggatgtcaaacatcaatttaaaaatttacacaatagagtttcagtacatggagagaatctgaatcacctatttctgggaactaggagctttgaaaaattgcagcctttgctaaatagtactactatcttttgattattttcccaattcattttaaaattctgaaagagaaaaactgcttgaagaagttaataaatcaatttatcttaactaaatatcacttctctttctctccctctcccccctctacctttttttgaaagcctttttctcagcttcaaacttctctctcttttctatgatttcctttactccgctatttccaggtgagtttttttttttttttatgttttcatttttatttttgtgatttttccaatttttatgccaggttcatcgcttgattagctttttactcagttgaaatagtttgctgatagctcttttgaagagctcactatcgcgtatttatatgttcggattgcaatgtttagtgaataaatttgaagttctaccttgaaaatacatgctacttgttttctaatcatatgaataatcagttttttttttttgtgtgacttatttggtaattgaaactcagtactacttaaggaacctttatgtcattaacgagaaatttatttaggtagtccgcaagtatataatctcaaccaatctttatatggtagtagtaagtaccaagaattttcaattgataagaaaataattaataacatttaagaccaaaaaaatatatatgtcttataaaaattaatagggatcataataggtctcgagccctaataatttatcgtacttaacaccttttagaaaactgaaacaaacactacaacgtacaggcacaatcataaaaggtttcagctttcatttgaaaccaaaaagttcttgtgctcacttctctgtccttttggtgggtttattttttctctttattcctccgcacctttctcttcctttctgatccaagaataaaattaagaaaatgcatgtagccctcttcaacttagtatggttttggaggctttgtttcacattctgacagagaaacaatttttttttctacccatctcaatagtttttgtgcgattttaaatgctatttgggaatgagaccttagcttttggcctttatagttctaatataattaaaaaaaattgttttattcttcaatattgtgaaagaaactcatgattggtggaacttttttgttttccatttaggttggtgaaatcatacatctctcccctttgtgtgtgcagaagaagaatatggctaccaatggtccacttaagagaaaatctccatcagatgatgagcctgtcaatttaaaaatcaaacttcaggtgtatgcctgactctttccacaatattcctttgttttttcgtaataattttttagcagagtctgcacatatatacatacagtatgcaccaatcttctataagtatgtattggccagttgttgtagacctgtaatgtctataaagatattgattgtcatattgaacgaaagttatattcatgcatcaaatcattattacatgatattttttttatgacaaatgttatatgaaactgtgcgtaaaaccgttctgcctaaattttgtaagcctaattgtacttttagttttttttaggtatagcagtgcgattttaatcaccgaaatgtgattttactattttaatcctctcatttcaccaattggattttaaaggtagcacaaatatcaacaacaaatttttgttaatatatatgaaataatatatatatatatatatatatatatatgtgtgtgtgtgtgtgtgtgtgtgtgtgtgtggaggattaaagttgtacaaatgtgttactttagactcaattagcacaattggaacatgaagactaaaatcatgcaattgcaacacctgagattataaccgtacattgttatactgaaagacccaaaatggaatttgaatacaacatttgagttctcaccttaacttttcttcattgaaccataggatgggcgtaatttgttcttcaaggtgaaccgggatatgaagttaattaatgtattcaaagagttctgtgatcgacagaagttggattacgagaccctgaagttcatttatgacggttttaacattaaggggaaacatacagcaagaatggttagtttctttcataagaagtcacacaaagttcttagtgttcatattttctaatatctcataattgagaaatgttaataatgtaatggattttctaatgcactcttttacacacattctttatgttaatgtgtctttcttataaccaatagtaaaatgtgtggtagaatgtgttaaagagaatgatactagcactcctcatgatttcttctttatttagttgagattataattaatataaataagacataatgctttaggttttaatatataatatcatcacatagtaagtttttaatatatcacaatttctaataaaacatcattcaaagtattttttttcataagttcaacaaaaataggacattggcagaatagtatatatagatgatgcctaatgcataggaaatcagaaaggcacttacaatattctttaccttctttacgtctcatattgcactatatataatatgtgaaaatgatattaatatgcccttctaggaggctgtaatatacaatagagatagtaaataaccaaaaattgtcacaggtgatttgatatttaggtttcttactgaagatctggagtttaataaattcccgtcttaagaatggagttgcaagtaaaaatattattttattccaaaatagatcgatttgatggaagaaacacttgttgaatgtcaaataaaaatcctaaataccttttgattaaaaaagaaaaaaaattcagttttcttaaatgattagcgccatatatacgtactactgcagtttgaaatcatcaatagtgttgtgtattagaggttatttcaacctatttcactttgttgctgtgcatcgctactgttagtgtagaagtaatatttactactaagaaagaagattgtggtaaaatatgcactttctcagtaaatgaaaaaaaattgatttacaaaataaaataattcgtcaattttgtgtgctatttgtgtatccatttaaattattttcaatacaaatcaagggaataaatccctgttcttttacatatagtcctttttttttttcctttcacacaactaacctatagtttaatttttttatattattgtaacttgatattccagcttaatatggaagatgatgccgagatcgtcgccataagaccccaaattggaggtggtgctgcggcactttgactcttaaaagcattagctaggaaatgtttgttgtactgcttagagtttgttaatttgcttaactgacatggtacattatattatcagaaaaagtacgcactttaactgtttgtatatcaagtttatatgttaaacttgagtagtattagtaacaaatgtactgaacaaaattgaagactaaggactaaggagagtatttttagtattaccattttattagtttggtgactctccaaatccggccattccagtgatgaaaactttatcagccttctgcggtaccaaactgacccttaggtttgaataataaacaataacaaatactaataaatgttttgaagacattgactaaaagtttaaaaaaaaattattaagatgcataaaatacattgttcataattttttttacttaaaacactagttagtgatatccatcaataattgaattgtagatatatatagtgcaatggaatgatgtcacgtgaatatgaataaggaataatgaaggtgggtgggggaagagaaatggacatgacatgtatgtgggtgtatagcacaagctaagttgccaaaaacactcaaggaattataggatatggtgtggagcgtaggtactgtaaaattatgcataaaaatagaacaaggagagtatttcaagggctgatcgaatagtttactgttttgtttcttttctctttcacaattcagcagcacataggcatatataagatgaatgactcttaaactacaagaagttacaattagataaagagtcacaaggcacaacactaattgactatagtggacagcacgttactcatacaacaaaaactatgtaaaaatcacagtgcatttgttttattttgaattcctttcgcatcttctgaatgtaaatgaattttgcattttacactgtaaaatacttctaatttaatagaacctcaaaagtttgcttcttattatattttgatttatttatactattttcttcttttgtataaaaatgcaaactgttaaagaaattgaggacgcttttaattaataacaggtcaatttcaagtataggcttgttgcattagaaataatagaaagaatgacaacgttgaaagctatcatgctctgtcacaaagagaatcaattccctctgcagtaagaacacctgaacacagatttgaaaatttgcacaacaaaatatttttagttcttataaatataaaaatatttgaaatttattatgtaaaattttaactttttgcttggaacaagaaatatatttacataatttttttacatcgattatatacagatcaacgtaaacatatgtcacttttacatatttaaaaagtcataatatactttaattttgtgaaaataaaaaatatacttcaaaatttacaaagaaaaattcaaaatatttctatatttatgagagagaaaatatatttaacccaatttaaaaatatgaaaatctacatcactcacttaacttttttcattaacacattttaggaaactgaagaaacaaacactaggagttacaaccataaccagatctagctatcaagagttgaaaccacactggtgtggttttcttctcttcctttgtcaccgattcaagaataaaataaattgcatgtacccctcttcaacttattagtgtggtttggtttgaattgatgttttattttcccactcatctaaaatgttttgtgcaatcttcaattgcatgtgtagaagaacatgactacatccagaggtcgaccatctaatacgagaccttgcagttcctatacgatggtattcacattaacggaaaacatacaccaaaaatagttagtttctttcataacatgtcatgtcacacaaagtttgggtattttttactgtgctatacgttgaagcataagatatgctcagttttcatctgttcagggtccatgtttggtgcttgtttcaatttctagaagactaagtatcttaacatgaggctcttcaaaaaaatatctagcataagttttttttcttcttcttaattttcatatttctaatttgttttgcttctttatttagttgagagttaaaattatgggtgagttcttaaatttaaaataaataaattaaaataagtatttttatataaatatttttttttattttttttaagaaacaaattctatttgtttcttaaaaaaactgtttattttaagtaaaaatagtttaaacaaacacatccgttgtatattttatttaaaaaatacttatttaaaaaaataaagttaaagaaactcacccctatcattaatataaataagacacaaaaatgcacaggaaatcagaaaggcctgccctgctcaatattcttgcataactttgtcttttttgggaatacaccttcggtttacttcaatatgaatttctttaccttatttacgtctcatagtctcatagtacactaaaatttgtgaaaatgaaattaatattgaactgtgcgtctactgcttgtgtataagtaatatttagatctcatattttgcatatagttctttattttttttcatacaacaaacttatagtttaatattttatatttatgtatcatgacttcagcttaatatggaagatggtgctgagatctatgccgcgagacaccaacctggaggtggtggtgatgagatgtgcttggagtttgttttgtttaattaactgatatggtacattatcagaaaaaattacgcaatttaactgatattgaaacatgttaaacttgagtagtagcaactcatgaatgtactaaacaaaattgaagactaaggagattatttttaggattttttttctttattatttgttaccaaggatgagagctcctatgagcaaatgatgaaaagataagaagataacaaatctccttgttgcaaacctcttcctagtattaccatctccttgggggaattttatttggtttgccacttggtggtgtctatggaacaccaaaaacaacattgcttttcgtgaacaacattttgaaggagtaaaactcttataagagactaaaatcacttcttgacagtgattcttgtacaagagaagaaataaatttgtgatctttttatcatagagtatcaatcatttgttttgtttttcctcattgttagaatatcttacatgattttttatttttattttttgtgaataggctttctgtatgtaactttgcaactttatttcttgtacagacttgcctaccatgtgcaatatattacacttttaccttccaaaaaaaaaaaaaaaaacaataactgaataatatacaaaaagcaacacaaaacatcattcaattaatccaacgttgattaaaactcattcccgatcatagccttcaagaaccctagttaagttcatgctaagccttgctaatatcagtccttaaaacaacttaatgccactctaattttgtaacagtttaaaattggtttaatatgttaataggttcccgttttttattcgggaacttttttatttggattcctaagcgatatttttatattgggtctgtggtcttgtaaattttttgtaattaagtttctaaagtcaaaatcgtcacaaaaataataatttagggctattttactaactctaagaactgaattacaaattttaaaagatcaaaaaattcaatttttttttaagtttaagaacttaattaaaatagatcaggaacatcctcttgtattaaatcttaaaattttaagcaaacttaaaatttgtgaatgaataaatattacatccactatttactcatttttataaatttttaatgtatgaatatttaaatttagggattaaattaagaacgaaagtaatcaagttaagaataattggagagttgctagttcatccatgtaatcaacctcgcacggccatgttgatgttaccaatccaatgcgcttcgctgttaatctctcccatcacgattgacaaaccctaaccccaatccccccgaccaaaatggtgaagaagaaggtccccgattggctcaacagctctctctggtcctcatcgtcgccgtcgtcccctccctcatccgctgtcgccagccccttcgaacagccacctccaccgcgtcctccatcccccgccgtcgtgaccccctccgagccgccgccgtgtcctccgtcgcctcccgccgcccacgatcctccgccgacgcagagaatcgatgattcgcctagggaagatcacggcgagggctttcgttccgcgcacgacgtgtctcgccaggctcaattgctggccgaggttccctctctccgccttcttctgtaaaacgacattgaagttttgttgattagtgcttttagtaacagtgttgattttgtgatgatttggtttggttcagttgtcaaagaaggtggtggatatgagcgagttgcggagcctcgcgtgtcaaggtatacctgatgctgctgggatacgttctactgtgtggaaggttaggttgcattttcgttcttttttccccctacattttagtcttttttttaaggagtttaattttcctgcactattactgtaaagatttatacattatcaacagatgaaaaatcatgtcaaatacgacttttaaaatagtaagtctataaacttaccatttatgaaaatctgcgattgcatgatagattcacactcgagtgtagtttagttgatacagtgtcagtgcattctaattaattttttattgtcttcttttctggtgtgtgtgatgaaattgatactatagttaaatccagcttaagtggttgtttggcatggataggaatgcagtgacgcttgaatggatatttaaattaagaaagaaaagtaatagaaatttagtttctgatatttttaggtgaattagttttatttaggaaaaatggagcaaggatttctgcactagggatgtgcattccaaatcatctaaccaaatatgcgagtggtttatttccattccattccaaccaaacaggtcgtgtgttcataagtctaagtaaggatatggtttggttgctattggttagtcaagagttttttcctttattgatggaaagatggacgtgaaatcatggaatgctgttgcaatttatgctttttgatacttgcagcttttgcttggatatcttccaccagatcgagggctttggtcagctgaattagccaagaagcggtcacagtacaaacaattcaaagaggagattttcatgaatcctgtaagttagttgcttagggagctttgatgccttagtgtcatcatcctcattatttttgttaaacttttgttttgttttttttttggggggggggggggggagctgtaaagatgccttaattgtcataagattgtatgatctgaaaactgccagtggttgagctagagctttagaatcaacatcaacatcaacagcacctttaacccaaattaattggggtcggtggtagatgaacccaatgataaatcgaaaataaagcaaaagagagaaacagagttaaaataaaagaatggtgagaggagaagagaaaagaagaagaaaagaatttgattcttgtgacagactatggtttgtagaagagagataattctaaggaatatgtcgtcacattaattatttgaatttaattgtagtttacttggttctttctgtcacaaactcacaatgatagggtgcatgtgtgtcaacgtggaattgatagggtgtatgtgtgtacaagtggaatttttgtggaattagtgatttgtcatgcatattctattctatttgctttatctatttggctctctgaatgtttctgtggctagctagtcagaaatcacaaggaagatgttcaactcgacaaattgtgatactgatgatgccaactgtgcgagggcattgctctctagatccgaaatcactcatggggagcatcctttgagtcttgggaagaccagtgtatggaatcagttcttccaggtagattgtaaagtgctctagtacttaaaatttaaaggaaaaatcatgcgatgcctttcagcttaaaaccgttggtggtattctagcattggtgtgaaagtttcaaaacactcaaggaattataggatatggtggactgtactgtatgtactgtaaaaattgtgcagagaaatagaacaaggagagtatttttggggatgaattctctttcacatttcagtagcacatatttatagatagatgattgactcttaaatgacaagttacaatgagataaagagtcacaatgtaaagagtcccagcaatttttgacttttattgataacaatactcacaactaaaattaagtaaaaattacaatgcattttgacaatgttgcataaactccatcaatattgtctcacgatgcatcagttcgtgacacttttaattttacatgaacaggtgtcactgaaaaccataattcttcatgaaacttcctttaccaaaaaaatatggattgatcgcatataccttatctgtaatgacaatcatttattgtctactatgaatgcttctctaaattttttgacagtacaagaggaccctgtgatctatttgttctaaacttccaataatgaaacgtctttatgaaattgggctaagcaaatttgttaccacatactattaatggtctttctactgtcaatattttaatctttaatgaactcttgtgttcattattgtatcacaattatataaatctcatgctaatgcactataatactctgtgcaaaggctgttgtgaagtaaatctccttctttgcattttgtaggatacagagatcatcgatcaaattgaccgagatgtaaagcgcactcatcctgatatgcactttttctctggtgattcccaatttgcaaaatctaatcaggtcctttctttgtcttgaaattcatacaaactccaaattcaagtattttctgccgtgaaccctttgatttattattactattttttgggggggcattttcaggaggctttgaagaatatattaattatttttgcaaagttaaacccgggtgtacgatatgtgcaaggaatgaatgagatattggctcctctattctatgttttcaaaaatgacccagatgaggaaaatgcagtgagtatatgcttttaatcttttaattgtttgtcatatgatctatcatcattgggttgcattatcaaacacctgattctctgttattgtccttgtttgtaattcatgctctattaacaccacttaccatagtatgttgattttaattgtatgtggtttctaaagattaattggttcaaatttcattttttctttttgattttgcaaatttcatttgaagaagtacttttcctttgttattcttctctgatcagatgcactatatctgtatgcaagtctgtcagtcttttaccttttgtatgcatacattctaaaaagttcatgtttcctcattcatttgcctgatactttccagtgtatgctttaatagaagaaggggctgctagaatggggaaagggaagacaaataaaaaattcacgtgtgacaagttaaaaagtaatcattgcttaggggaattgggacaagaaattttaccaaatgtaattcggcattgccctgtatacataaaatagaaagtatgtaaaatagttaatatgaacatgggaatgttgattttgttgtaaacaatttgcttaggtggcaatatggtggaataatgtagattcattaacaatgtcatgttctactgtattattggttgactctgctcaatagttccctattataatttgcaggcctctgctgaagcagatgcattcttttgttttgttgagctattgagtgggtttcgagataactttgttcaacaactcgacaatagtgttgtgggaatccgttcaaccattacgagattgtcccagcttttgagagaacatgatgaagagctgtggcgccatcttgaggttacttctaaggtaagacagttttagtatatattcatcttctcacagttccctttctgtttaaatttggaaatattgtgagaggataggcatttctgttaaagtattttaattcttgatattataattagttattaattatttatttgtacattgcatgattgcaatatctactgttatgctagcattgtgtactgctctgttataaatttgttaaataagctaaataataaataaacaagtgtggctccttcgtgcttcattatgaccttctctatgttagaattattattttggccactgtttttctgtctgtttatactgttttatgtttctcaactagttaagtgacgggcctttgactagttatcataatacattttttgcatgcacacctgctggatgattcaaccatgtatttgcttttggctattgaacagtttatcagattgctcattttttctggttctgaatgtcaggtcaatcctcaattctatgcatttaggtggattactctcctgctgactcaggaattcaattttgcggacagccttcacatttgggatactcttttaagcgatccagatggtccacaggtacatttcatatttaaccttgtactatgatggacttgcatttagacttatggtccactgcctcttgtataaaaaaaaatataaagctacttttacttgacaaaagaaagaggagagaatttggctctacatgagtatagtatagttcaagagagcaccattgacgagtaaatcaagacaattttaagtttttatcaacaatatattttgctattagactgcttttccaagttgtttttttcataatggtgatctacttcgcacttaactctgcaggaaacgcttcttcgggtatgctgtgcaatgcttgttctcgttcgtaagcgcctccttgcgggtgatttcacttctaatctcaagttgctgcaaaattatcccaccacaaacattagtcatttgctctatgttgccaacaagtttcgcgtacagtcagtctaaatgttgcattttgctcttgtatctctaatttctctttcaaattcagtgcttgtaaatgacttagtgtgagcttgggtgaagtaccgtcacttaattcagtttattcattattttaacttataatttgtacgtaatttttcttggggggaggggtcaatgtgagcttgggtgaagtacgcttataatagcaggaacttattttatttttttattttatactctaggtatttttttaaccttaccacattcaattctgtccactctaaaatgaccaattcattgctaagacattaggtaaagctagttatccatatactagtattatacagatattttttaaatttaaataaaatgtaatgtataaacaaaaataaattaaagtgataagattttaaaattgaagacaaaattgtagaaataagttatcaaaatcgttacacatcaatatttggaaaggaaagatatattttggtataatgtatcaatatttaaaatttaaattgagtaaattgaaatcaaatttaagaagtaatattgtttttaaaataaaaaatttaaatgaatgatttttcgcatcaaaatgataaagtgattagtgtttatggttttaagaatttgaacgaggttttattctaaaattaatgtataaagttattttaaaatataaaagtaattaattgtgaaatcgaggataatattgcaaaattgttctacatttataaatgttccatattgacaaataagtattttttgtaatttgtgtttgattcaacttattttaaaggaattttttttttctattttaagaatcttttaaaaaaataattatttttgtggaagattctacattgataaattatataaccaaaataaaatatataaaagacaattcttattttataaattgattttgtaggtttgagatatgctccgaatcaaaatttaaaatgctattaaagtctacaaccttcacacttgatatgcctaggttctcaacatgagggaaaatgttagatatctcccctcaactaaccatataattaaaaaatagtatatagatgagaacaataaaaataatatataaatgagaacaattattgtaatgtaagataattatgtaggattgagttaaattttaaatttaaagagtgtctttggaaattattgtctctaaacatgttttataagcaaatgattcaatgatagacatgaaataataaaaatgtttatgaaaaactaatatattttgtaactttttgatcacataaattaagttttgacttaaatataattttgatttttctattttttaaaatttgtaattttggtttccttttaaattagagatatttaatttttatattttctaaaattcacaattttgatctccttattttttttttctcaaaatccgtaattttaatttttctattttataacataaacatttagttcttcacattcataaaatatgtgatattaatcttccgtcaaactaaaagtgttaattactaagatattaacattaattatgatgtaaattaaacaataatcttatatcacattactaaatttgggtcacaccaaattaatttcttaccaattaacaaaaattgtatattttataaaattagagaattaaatgtatttattttaaaataggagataaaaattatagatttttaaaagtatgaggactaaatgtatttattttaagacagaagattaaaattaaagattttaaaaaataaagggaacaaaattacgtttaagccttaattttttgattattaaactataaagattaagcttataagactaaaccaaacagatgagataataaaaatgctacggaagtagtagtaggtgtacatgaacatcattgttgttttgtgtgttggggtcaatcataatccgtcaaaggcaccgcaatgaagcgaatctggtaaagcagaaaagcgtagttggtgaaattcctgggatcccccactggacggagtttttgttgcttagctttgctttcctttttctttcattcattcctttaatcctctcttacactatacgactcctgttccattccatcatcactcattcccaaacgaaacgcagcgtttcttcagattcagacccaacctcatggtacgctacgcccttatcaatgaatcctataagtaatctctgttgtgtataattaatttttacgtttcaggcaagcacgttgcggttatacttgacctgcattcggaacacgctcgaggccgcaatgtgcctccaggtatcactccttcttcgtcaacgccactatcaatattcgtttcttttggcatcaacaaaataatcacttgttctgttctgttgtttttttctcttcttcgttatgcttccagaactttccctgtcaagaagtcgaaaggcataacaagcccgaggttgaactcaagtacgttctctctcccctctttacttcattgcacatttgctccatattactgttctaaatctatttgataatggaaaaccatatactgaaataaaaaatgtattttaattccacattttccacatttaatacgacgattcacacgatgttgttcttataaaaaatcaaaagtggtcgattttgtgaactctgttggtttatgtgcagaaccagccctgaactcctgctcaatccggtaagatccatcttaattcatatcactgtgtagtaatttccacttgctttactaatgctgattagtatgatttaagattacgtgactaggtttctgaattgccaaactgctatatgatattttcttttcttttccttcacagtatgaaaagagaagttagggtgccaggtattccttgtgggctgtggcaagtagttgatagaacctttggccttaggctaaagaaagtaggcaagtcaaatcataattcatggttgggttttttatgttaagaatgagactggtgttctattataaaacctcttccttcttcaaacttcaaattggccagtatttaggattttggagtctagcttttgcgaaatttgtgatacttcactccaaacttctgtttgataaccttctttgcacttgtgttgtctattgactttgttcgttcctttaaatttttcttcttggaattctaaggtcattgtgatttgtgacttgtgagggtaatggctcagagcttttgtgaagtgttacatgatcaaattttgacaaattagaagaccttgtaaatgccttttctttatatcttcttcacatgcaccaataggttggagaggcttaaccatctgtttctcagaggtaatagcttgggaaatttggtgcagatagcctgctctttgttggaaggagtggatttgtgcttcagcacttgagttgatggtgttgtgatgggctgttttacagattccaattagaaggaaagctagttgtcactgtcctatatattctctaaacactagtatttctggattgagtggagtgttggacttcaacagataccttattccaccattttccttgtgatggaggcttcatgcaatttataatgctagcttaaggtgaaattataatttgtttccgaagcatttttcatctgaaaggggaaaaataacacaaaatgagacttgtctaaaaacaaaggagaaaaataactgtatcataaataaatactcgcagccagagaggccagagagagagatcaacatagaaggttgtttagtggtgaggatgtgggatgaaataatatattgttagaaagataggatgcaaatgctcctaaaaataaatgtttatttttttacttttttgggataatagtaaatattaattgaatgcaaagacatgatgtacagttttggggtgctaagcggggctagagatccttttttatatgtaaaaaaaaaaaagagagatgaaaacatcaagcaaaagtggctgaaaaattgtaagaagtgatgaaaacaaatattttagctgtatgactagatttaagatagcccatataatttgtggttaaaatttaaatagtgcctagcattcaattgtaaacaatgaggttaatgttttaagctaactattatcatggttattatgcattaatgtcttcttttagtctaccattctaaatgagtatacttcattaggattaagcagactcttgtaggtggtaattgtgtcttaataatttcttctcttgctctaccttcctaagtgatatattacttttgcatccatgctttatggaaaaatgtgtgcaattgtttttacaggttttgatatgtcgaaatgaggccgaaaaatgcttaatagaaacatctatcaattcattgcggataagtctcaaggtaaatctttttcttttttgtgagactaatgctttgttaaaatgatctaaaattgagtctatgtccacgatgatgtaacaatttcttcccctaaccggaggctattaaattttgggtgtttttttaagacatgaactgtccattaaagctcaggatatctttcattaacttaatgatttttctttatgcttcttccttttttatagtttgctgttaatgtactacatatcaacaatgtgtaaagcttcagattgatgtactgtgcagtctctacttctcttgaatattgaaacatgttatacttagtgtgttggaaatttagaataactaaatagaaaataggtaggtagagaaggtgagtagaatttgaaaataataagagaaaaagtttcactgtgcttggatggaccactgataaggtggctgaatctgaagtgaaaattaaattcagctgggatgactggaattgatatgcaggcattaggacagtgcatttaaactttgtgcaactggcacctgtccaaaaattaataaatttcaatttaatgcctttacttttacggtcaggaccgataatcttagaaattccaatttgtgaggtccacatatatgatgagtactgcaaagttgcaaatgagtgttataggggtttgccagaacaagttgtctatattctattataatgttagattcctttatatcagcttacagtttaattttatcagcaatttattaaactaatatttgaatgagagtttgttttcaagcatcaaattcacatttaatttgtccctaattcgttgttttaattttattctgtttcatcctgtgcaggtgaagcaggctgatgaacttgaaaacatactgaccaaaaaatttctaagatttctgtcaatgagagccgaggctttccaagtactgaggagaaagcctgttcaggtttagcattaatttacatagttccatttgtcttagtaacttgtcagtgatcattgatgtcatcctgttgcttctgttggcagggatatgacattagcttccttataacaaattatcactttgaggagatgcagaagcacaaacttattgactttattgtgcaatttatggaggcaagaattttgttgaccctattacttggatttgcattttattttgcggcttatagtagttatctaaattagggatactgtatgatctatggagtgactatggaaaacattagcaaaggttctatggaacatgattctcccaggataattgatgcaaagaaaagcataacttgcaaaaataaaataaactataaaaaaatagaacaacgttttgatattctttattagatattagatactagaccttatacattaactttcaaatagggtaaggtgtataactgttttgcttacagacttttcctgccaattacttgtacttgtggttgatatttggtgtaatcaacttaaaagatttactgataatctgaaacagagcaagatgatgtttttgtttgctttttctattaccttcccaacatttaaagtggctactttcattgatctgttgtacgttatataggatattgtaaatattaaaaatttgctgtcttctatgttagttctgcttaattgtttgtaatttagtataataatggccttcaaattgcaggacattgataaagagataagcgagctgaaaatgtcggtgaacacaagggggaggcttgtagctacagaatttctgaagcagtttatctgatgctttagactagttagaacttccatatccgtgtaaattgtactattgcacgtctagttttcacttcacttatgaagtgcttggtcctttgagccaatggtttgtgtttttattatatttaacagaagtgcagaataaattttgtagagtttagtacagtatataaagaaagatatgacaaacctgcatgtcacgcggagaaaatgaagctacagcagctcgcagttagcacatttcctttcccgtgtcccacggtttcttcggtttagtaaaacttgttaaaataaaggacaaatcaactatttggttttttttttttttttttttaaatttagtcctttatctttatttattttttattttttgttagattagtcttcgaaatccatttaagatcgacattgttaattattcaagaatattttttttgttaaaaaagaagtgaagagaagggagaaaattggataaaaaagtttatttttaaattattaataacgtcaattttaaatagacaagaatcaagttgagaataaaaaattaaattgaattaaaaaataagataaagaatcaaataaatttttaaaaaagttaaatgattaaattgaaaaaaaaaataaggattaaattaaattttttaaaagataaatgatcaaatttaaataaagataaatgatcaaatttaattatttaatctcaaataaattaagtcattaattattttttttttcgaaatgaaaatatggttgtcccatcttaaatgaatttcacttatggttttagacctggccggtcggatcatgattcgctagctggactggtttgagtctatcaatggatcttttttatcccgtgtaacccagtgcgacccggtcgggtctatggtccaaccgctgatccagcaaatcggactgggtcgctatttgaaagaaaaacaaaaatgtcttctttaggcttcgtccgctacttctgcttctccttccaagcactcacgtcacatcgttttcataggggggtgggttgtgggggggggggggggttggccgtccgtggtgggggtggggaggtgagtttgcggtgcggggaggggatgttagggaagatctcaacggatttccgaggggtaggtgagtgttggttgggggggtggggatggggggcatgggggtgccgggggcaatgaactttgtcacgaattttttttttttgggggggggggggggggggggggctgctcacatttcacgatttggtgcgggaggaaaagggatgggtgggtttgcacatatcgaggtttttttttttttgagggggggggggtgttaaatgattttttttaagaaaagtgttggtatcgagacctttttttttttggggggggggggttaatttttttttaacaaaagtgttttaaactttgaattttaaattgaatgaatactttttaagcctgttaataatagataaatggtgtatataggagtttatttttctttattttttagatatataaaatttgtttctaaaatactcataaattattaatataaaatgaaaataaattaagtataagtatgtatatgatatagagatgagataatatcattataattttccttgactaaaaatgagttattgagtgagaattataattctataattttgtattgatgattttatttcttatatttaaacttatttagtttatgttataaaaattttaaatttttttgttatatatcgagtcatgcgagtcaatcagtaacctatcggttcgatcattgacccaatgatccagtaccttgatcgattcgatcactggttcgatttttaaaactatgatttcacttgtatcaaacttaacaatatatttaaatctaagcatcttatagatttgaaatttgagttttccaaatagttcagtttaagagaggaaagatgggaggtgaaatgagaagaataaaacgaaaaatcacctaataaatctattgtttagggttttggaattcaaaaccaattaaatgagttttgtgagaccatttggggtcctcctcccttagttgaatggtcgttggccaatgggagtcgagcttaatagctttcatatttttacggtgcaacactgaatgtataattgtgaggagagaatgcaagaatgtgcaaagcgcaaaattatatagtaaaaaagatggttatgttggaaaaaaaatcagtactacgggaatatgtattccttttgataaaattatgacaacgttataggtattttttgttttaaatttcttgaggtaaaaatatggtatactaagcgtagtaaccatctaaagacgagatttgttcattctcaagtagttagttttccagttgctaatttgtgatggatcatgatctatagttgaatttctactttagagaataccatcttttaaaacttttttaataataaactgaatagaaaataatataaataaatatatttacaaaaatttaataaaacaaattttaaaaaatacattataattaaaagggtattttatggaatttggggttacataatttgggaaattattctgaaaaagaaaaattaattagtactataaagacattagttaagaaataaaaagtgaaaaaaattatgcaaaagtctgacacttaattttgtcatcagtgcatatgtggcatagttgtttttttgttttttgactgatggcatagttgttagtaaatctatatttattaactttttgtatgagttagttcctttaaaaagtgagtagtacaagaacaaggcatgaaaaattatttgtaaactaggataaatactgttcgacaacaaggcatgaaaaatactgtacgagacaggatacaaaacaaacagaaacatgccaaattttttaaaaaattactacttgatattgtataactgtaaaataatatataaagttattctataattttattaaaaaaataaaattaagtatctatctagctcagttagtaaagtgtaagattcttaaccttgtgattgtggattcgagccccatggtgagtgacttcttttttttatgattaaatttaattaaagtatttgaagtgtcaatacagtatctgatatagatatgcatccgactctgacatggttatttagaagtgtccgtatttctaagtttgtaagatgtttaattttagtatacatgcaaaaaggcctttcatgtctcttcttttcattaaggtataaaacagtagcagtaacattgttttgtttttttattataaaaagggtagctataactataagatatctaataatggtataaagttaaaaatagaaaactgtgtacttggataaatatgtactgttatggtctgataggtatgttctgtctcaagcatatattgaaaatagctatacaacctctaaagattatttatttatgggattgagtgctgttatttcctcgtggtctaacacaaaatttagttgttttctgttgcattacaatatcgaagaatagctcacatttgcaatctctaacatgctaacaaaaaggaaaaaagttggtgacagaagttatgatgccaatacagctggctatcgagccatcttccttcctataactttctctttattgagttttattctcatttctctctttggtaacttggcattgtcagcaagaatgaatttaagtgcaaatgagaccctattcttgtcggttgataaaatcaattttttcacctataatgtgtgcactgttgctccacccaatattgtttcagatggcttatggggtggccaacttaatggacggactccattgaaatcttcactcccattgtttgagttgcaggtgcttgtactttttgctatcacccaaatctgccaattcctcttaaagagctttgacttccctcaatttatcccacaaatgatagtaagtattcttcttttactatcttttatctttgagccatagcctatataaattaaaatttccttgttcacatagttaattaatgtttctcataaaatagagaacaaactaatttaaaaggattttccttatggtctgcacatcatggcctaaaaccaatccaccatatatgaccaaagtgatatgatagaacataataaatagtaggtcattatagaccacacgcattatataatattaggtggtcaattttttttactaaacgaattgacgtgttttctttttaatcttggattgatgagtgccatgcacctctgttttaacttttatcaaccttaagattttaacaccatatttacttaagctcccctttacactcctttagtattagccaaggttttaaaaaaacgagttgcaaccataacttcggccataatgttaagatttttggagtgtctataaccgtaattgtaaccacatcggctgcatttgtccacaattttccacaatattatagaatcagatgaaattgggaccaatttaaaatcttgatattgcctctttaacttcttttctctctctaggtgaggtcactcagaatatttgtcacgtgtagcatgcaatgtaaaagttgtttagggaaaaatgttaatttctcatatttcatccatatgccactcttgcatctagctgaattattaaattttgccttttttttgtccagaatttttcatattaatacaaatagagtgttgtctctcttgttacttataacttctgataaactaaatcaattttttttttaatctgcaaatgttagtttattagcaaagggatcgaacccacgatcttttctctcatcccttctcccttttcccttaaccatccaactcactttatatttccttgttaaactaggccaatgtcatgtcctcttggagacacataggaagactcattaattgattcataacttgtttccatttgcaggttggcctgattctaggccctgctgttcaggtagagatgctggacaaatacaagaggaaattgttttcatttccaagtcaggacacacttgcaacaataacatcaattggttatgcatttttcatctttacaagtggggtgcaaatggatttgagcatgataaccaggacaggacacagggcatggaccattgctattattggattggctgtgccgatacttatttgtattccaaccataatcagcattgaacgtttaattcttcctgttgaatatcaaatctttaatgttactactatagttctaccagaaactgtaatttcatttgcagtagttgcttccctcctcaatgaacttaaaatccttaactctgaacttggcagattggcgttatcctcagtactggtgagtgacatattaagcaaaaccattatatgtgttgccaatatctttatggatgccaatgaaaaccagaatatttttgtgctcttggtatcattgattgcctttggcatcttggttccattattttttcgaccagcaatgttttggatcatcaaacgtactgcagaaggaagacctgtgaatgatggttatgtctatgctgtcatcacaatggtatttgcattaggttgggttgcagttcaaatacatcaagaattcatcctaggagcttttatgttggggttggctgtgccagaaggacctccattaggatctgcattggtcaagaagcttcacttctttggtaactgtttcttcttgccaatatttgtaacttgcagtatgatgaaggcagatttttccaagcacttttcatcaaaagtagttatgatcactgctttcagctctcttttcactcaccttgtcaaagtaatagcatgcactatacctgccctcttttgcaagattcccttcaaagatgccttgactcttggcctcattttgaacgttaaaggcgtagtggaagtcggcatctatggcatcttatatgacgaaggggtaatatatttacttccaccttaacttgtctttcaataaaattaagggtaaattatacttataatttcacactttctcaacttacttccctacgcttctttttgtattactaagtaaccccaattctttcttttgtcattgaacacaccctccctccctcccttttttttctttaactacagttttagactcactagtcacggttctagatgtggtaaaaacaaaggtacagagggtttagtgatacaaaaaatataggagtaagttgagaaagcgtgaagcatcaatggataaaatttaatttaccctaaaactaaccataatcttgagtttgaaaagtcttatcactatcttctatatttaatgcaatataaaatttcatttatatgtgcatgcagactattaatggtcctacttatggagtaatgatgatcaacataatggtcattgcaagcttagtgaaatggtctgtgaaactattgtatgatccatcaagaaaatacgctggctaccagaaaaggaacatagagagtttaaaaccagactcggagctgagagtagttgcctgccttcataaaacacaccatgtatctgcagtgaaaaatttccttgacctttgttgtccaacaacagaagaccccatcactgtggatgcattgcatctaattgagctaattggaagggcctctcccattttcatttcccatcgcattcaaagaacgatttcatcaagtggccacaagtcttattcagatgatgttattcttgcttttgacctctatgaacatgacaacatgggtgcagtaactgcacacatttacacagccatatctccaccctccctgatgcatgaggatgtttgtcatttagcattggacaaagtggcatccattataattcttccattccatctaagatggtctggtgatggtgccatagaatctgatgacaagaacacgagggctttaaattgtaagctcttagaaatagctccatgctcagttggaatccttgttggtcgttctgcaattcatagtgactcattcattcgggtagcaatgatttttctgggcggaaaagatgaccgagaggctttgtgcttagccaaacgagcaacgaggaatccaagggtcaacttggttgtgtaccaccttgctcctaaggaacacacaccagacatggagtatatacgagataatgaggcactaaaacatattaagaaaccacacttaggaaatgtaagttaccaaaaagtcatagtgaatggtggaccagagacatctcttcttcttcgccaaatagtaaatgaacatcactttttcatagttgggagaagacatgagttaaactcacctcagacggttgggcttacaacttggagtgaattttcagttaggtgtcattggtgatttgcttgcttcatcagattttgaaagcagagcgtgtgttttggtagtgcagcaacatcaacatgtaaaagaaacatcatagtgggtggaaattctagtagccaaacaacatggttactcttttcacttgtacaaataatgtagatattctttttatgctgcttgtgtttcatggttgttgcattaactattttttttccaaatgattatttgctcttttatcttctttttttatttgctttgatcttttatattttaaaaaaataatttcaattctttatgtttttaaaatattcaaaaatgattcttttgtcaaattaaagttaacaccattaagtagtatacagatactgaaccgtcacaaatgaaaaacaaaacaaattttcaaattgaaaatgacaccctaattcccaaattgaatgtacatggtggacaacgcttccctccccaactcgacgtggatgcaactggtctcatatttctgcgtcccattttccccaaggcctctatctcactctgcagtggtgcttctacaaattctcttcctcaaaatgacgacgtcgtcttgctggcacacgaatcgatagaaatctggttgacgaacgttctgagttgttgttatgttaatggggcgtggaagagttgcagtggtaggtttgttcttcgccgttggaggagtcaaggaggaggatgttctgtagcttgaggattgaagagagacaggttgtcgatgccatcgaggaggaggagattttgcagcttaaggtctgacgagaaatttaggcaattgggtttctggtgtggtgagtattggatcgaggttggggtggcgacgcggtggttgtgcactgctgcagcttgagatctaaagagagaagaagagaaaggaaaagatgatgagaaaaaaacttacatttttttatgattttgaatcgttagtacttttatttcattaatggtatcaaatttagataaacagatcattttaaattaattttaaaagatatattatcataataaatttttgaaaaaataaagaattaaaataaataaataaaataaaatgaaggcttaaacaggataatctttttggcagaggtatggtctgtttgatgtttatgtaaggttctgtagttgtgtcaaaatgatgaagttgataattacagaaactatgccattggaagacttgtgaattcgcaagcaaacaatagtaaatttgtctacttgacactttttcttaagaaaaataaggtttaaatacgtaatctagtgaacgaaatccgttagttgcatggatatcaactcttcaagaccacataggctagttagaagctggacgagagcttaaaatgaaggtagaagcaagcacttgaatgccaaaaaaacagcagtggcaataatcattttaacgacaacagtgcccaaggtggccttctttctgtccacggtttatgagcattaatttcgatcaatctacatttttaaaagaacaaaaaaatcttgtcttctgttggagttttttttatcactctgcaacttgcattgcatctaaacttagaagtcgttctaatcataccagaaggttgaatttaattgtattcagtgaatgacttctgcttattctcctttttttaaagaaaaaaatcactttagaaaagaacaaagtcaccaaaacgatggcatgataactatgtctatattaacaaaagaaattatacttctatgtagtaactagtaacataaatttgatggttgactacaataccgatcaatctttaatctttacatgtcgtaccactgcaatttaactaaaagatgctcaaaatgttaacactgtttttaagaaatcaactgtttttgggctggggatgggaggagggggtccaactcccaacggtgagtcttacaaacccaagattttgtcattactggaaaattatcatcgaacttaactacttaagtccttatttagtaaaaaaaattctattgacaacatcaacaggtaaagcataagctggatctaccggtttcagccctggatattcaagaagtgaaagtcctgcaagcaaaaacacaacttaagcgtccatagtttacagtgtaaaagcaataggcactgtcagaaaaggaaaaatagcgatgtctagcttataattcacatatatgctcacttaaaccttccaaacaactaaaataaaaatagaatcatgttaaatatccagttctaatgaattattataagcatgttgaacaatacgattaatcttatctgaattcggaacataatgctagcaacttcacaacatgaatccacaaggattctataaaaatggtttttcatctctctttttagaaacaggatgaccgaatgaagtcactggttaatatcattcccacattgagtcatgggaatgggagagattaggtggttccaatacaaaccaaggaacccctagataacaagattttagcacaacaaatggaacaaaaaaaggtgaaatgatggaggtactctaccagccaccccgaagaatgtatgaaagacatccacggcatcatctggcctgtccgaaattccaccattttctgtgtccttacagtttcaacatacataatatttcagaaatactacctgacaataattaaaaccccaaaaagaaaaaagaatgcagagttataaacacagaaaagacactcaactaactaacctggcagtctaagatgaactttataagcttctccttacttatccaatgtaccctatcaatcatgatcaggctagaaagaacccaccatgagtagcagacctgagaagatctaaaacctagtaagagaaaggaaaatctacagcactaaacctaaatttgaaaagatttactcacatcaggaagtttctcaggacgcccattcagacctccagatttaacctgtcgctcgcataaccaccaaccaagaaggtctttgtcgacaagatctagtgaccctgttatggcaagggcccccacacaacagaaaactgacaatagtaaaagcaaatatattagaaggatgatttaagtccacaacccatttcattctttcatttgaaattcagaaaacagaaaaattaaacagacaaattcaggcttaacatgagtaaattttgaccacaaaagaacaaaaggaaagtacatcattcctatcaggaaaactaccaagtagttggataatgtaagtactaggttacatagctatactgtgctgccaaggagaaaattgattcttatacccacaaatttaagcaacatcttaaaatttcaaactatgcccttcaccacataaagcactcccttcatgtgggaaagaagcacacaatctttaaaggaaaaagtagtattagtacacacattgaataagtaacgtagggaaattaataactaactaaagatcatgaataatttatgacatactttgaccagcatgagattccccaccaggaatgcacccaaaaccaccatccatatttttgcaacttataatgtacttcacagccttctccaaattgattttatccaagcgatgtaatattgatagacaacaaatagcaatatatgagaacctaggacaaataattcagtggattttagttaaaaatacagtaagctcttacatgatcaataataaaaaagaatcgtaagaaaaataccgcgtatcaacttcaccccacatatcccccgaaaaggatccatcttcattttgcagactgacaatatctgacataaatagtaagaaacacaagatccggtatgctttctagtttattaaattttactcttgtagttttagtatcgaactgtactaaaattttttctttctaagaaacatatcaagcaattgaatcataacatcaaagtattttgccaactgaagctacatatcctgataaaaaaaacagatctacaatagttaaaaaaattgcaaaaataacaaagcttcttctgcagcataaaatatttgttaatacagataacgggaccttcaaagtgaggcaatatgtgtgtaaggatacaacttgtgaccttatctacatcaataacatccagcttatcaaagagagccaacacctgcacagcacttagtgtatagaggatgtgcggatcatgtccaacatttccaccaaatcccccttcacaacaacacattttctcataagaaactatgaatgacactgatgtctaaaagaatataagggaacaaataaaacattgaagaacctgagtcatgctgacaactcatcaaccatgaaacaacctcatcaacatcgacagtatgaagctttcctagaagatccagagtggtcaatccccaatatgccccattcattcttagatgctccattacgacagattcaaagttatcttttctctggaaaccataaaaggacaacctattaagcattaaagaagagtttacaaagcatccatgtataaatgggtaacacagcacaccttttcaactgataatatatatcgaacatgtttctcagtcgccaactctcccatctcacgagtaaactattctattccaacaacacaacaaaatcagaaatattagaatcaaagatttaaaatgaaattttgcagtgcacccatctcagtaaagaggatgaaggatgtgggtgaaccaattccaattgaacaaaaaaatgaaaacttaccgaactccttaatcaatgtcacagtcagaatccagaagggtcgcgggagtgatacgaagtagaaacgctaatgctctattagtttgtgccaaggtcaagcgaaagcgaaccaacgctgttatccctaattaaaagttttattaaaacatggaaaatttcattgttgtcaagtcatcaaattgatgactaatattatagttaattttgagatgaaattcttttatactggtgtaaaaggataagtattttacaaaatctaccgttagattgaaagcttatatcatgtagattacatgtatcaaatttcacaaaaattcgaaatcatttgaaccctaattgatatttatatatatatataattaactgtatatgtatttctaaaatatgtgaaaattagactatttgatatcactacacaaatgattttggatttttgtgaaatttgatatatgtgatctacatgatataaactttcaatctaacgatgaattttataaaatacttatccagtaaaaagttattgaatggtgtaaaactttactataaagttttacaccggtgtaaaatatctcatttctaattattttatttgaattgactttcaaataattagcggtattaatttgtactttcgataccacggttaagagtaatgtcatatccttttgctatattttcctacaaaactttttagcttataaattattataaataaataaatattttctgttaaaacatgggcaaaggccaaacagaaactagcccagaccaatttacataactagcatcagccaataagactggagcaagaaaagagggaatgatgtcaaaatactccattatgtatacataaaacacacatgggagtgatgggaccaaccaactcccttcataaccaaattcacaactgagtttgagtcagtttgaatcagcaccttgcgaaatcctctaacaaattcctataacattctacacatttagaggatgttttacaggattggagtcgatactttgttagttcatactagaagaacgagaaacaatgttgcagaccgtctagcgaggactactttttctacttttgattggatatggattaaggaagttcctcctcaaatccaactctttgtaaaccatgacttgagggctctcacatgctatttcagttaatatgtccatgattttacttaaaaaaatcttagttaatcaatggtgctcaattgaaataaatgggttggtgttacttattttgtaatgttgcttagcaaattcttttttatttttgacagagttagcaatttttaacaatacaaaatgtcttcttgtgataaataatcttgattgaacccaacgactgatctgaggggtgggagtagaggagccttgccccctcccttaggatttaaaaattaaattttaaaaaatactaataaagaaaaataagtttttgaattgataattgtttttttttagtaatagatgatatctctattttaacacgttaaattaataataaatattattgttaaatttattatttattaaataattatttatttgaagttatttaaatattgtgtaatttttttaaggttattaaatattactcataaatatttaataatattatgtaactattgaaatgtttaatttagttatagttttttcttatatataagattcaatttaatttttcataattaaaaaattagttattttaaatttatatattttttaaaacatcattattaatgttttttctcataaatacatgttaatataatatcttttatgttatttggatcatatatatatgtatgaacaagataaaaatgattaattgtggtggagaaattttgattattgagtgagacattgatgattttcctaaaatatatgagattaggagggttaattaattagacattaggctaaagtaagttgtcttgactagaagacagtgaagtgaagtgaagcgcagcagtataaaagaggtttgtgaagtgagtgagagcggaagcagagaagacagaagaatgggttcaaaggggaagaagaaaggttcaccggaagacattctggaaaccctaggagacttcacgagcaaagagaactgggacaagttcttcaccctccgcggcgattccttcgagtggtacgccgaatggcccaacctcagggacccactcctctccctcctcaaaacccttcctctcccgcttcagctcctcgtccccggctgcggcaactcccgcctctccgagcacctctacgacgccggccacaccgccatcaccaacatcgacttctccaaggtcgtcatctctgacatgctccgccgcaacgtccgcgaccgtcccctcatgcgatggcgcatcatggacatgaccgccatgcagttcgaggatgagagcttcggtgcggttattgacaaaggtggactggatgctttgatggagcccgaacttggcccgaaattgggaaaccagtacttatcagaggtacgtttctctactttgttatttcttacgagttcatgtttttggtaacttagcccttttatttttgtcaggtgaagagagttttaaagcctgggggaaagtttgtgtgccttaccttggctgaatctcatgtactaagtaagtttccttaattttgtttcaccgtgaataataagagaaaaacgtgtgatacgtagagaatacaattgaaaacactaagaaggtgtgatggtgtttcaattgcagacgttttgttttcctttactcttattgaaagattcatggaacaaggttcatatgtggtacccacattttagactttcctttgtgtattagccataagaaaataatacttgaatgtgaatgatacttggaagagggtttgcacaaaacccttcctaactcctggacgtcttgctaaaaaagaaacatgctaccaagaagctatcctgtgttaccttaagaattaattgtagtgcacttggacagtgtgctttgttactctgcattgcaatgaaatgattttctggaactgtttttgcattttatctttttcattttttacgtgattggtttggtatcattggaggataaatatcactatttcacaatttccagatctacttttctcaaagttccgacttgggtggaaaatgagtgttgatgccatacctttaaagtcttctggtaaacctagccttcaaacatttatggtggttgtggagaaggagctgtctactttagtgcaccagattacatcattgctccataattcatcacttcattgtaattcaaaacaggtagactatctgggctatttgtacattctgtttattctcatggacataagagttttcttaaaataaggatttatggatgattaatgctacatctgttagtggtatagaactatagatagtattactctaggttattaatagagaaggggtagttattttgttaaaggttgtagggtttatgcagggaaggggaaacagagagaaaatgctctgaatattttgacattgatttgatgtgtgtaagttatgaagtactaatgcctatttgtacagagaattaggtcttatgtttatgtcttgcccccccccccccacatttgtgcaaggtttctggacttcatgaggctcttcaaaatgagaatcaaattcgtgaaaaatactccagtggctctgatatattatattctgtggaagatctgcaagaggagttgacaaagctttctcaaggtcggcgattgcagctaactctgggtggacaagggtactccactttttcttacagagctgtaattcttgatgccgaggaacaggccgacccatttacctatcactgtggggttttcattgtgcctaaggtgtgttttagcggagatccctttagatttttgttcatgcattccttctaacttcataacaagaaaaaaaaaaaaaaactcgcatggtatgctcatgaagtttcaaaatgaatcagtgatccttctctggagattcaagcacagtagttttaacaaatgaataaatgtgaaatagttattattggaagtaaagaaccattgttaatttgcttttgactagaatctgctgctgacaatttttttgaaactaggaaagacaatggacaattggatacttgttattttcaaattttctgattcttttttaatttctattcttagtagtctcaaccttgttcatactgaaaatgataaaactgtaattgttttgttttggaatatatattcagttcatcagttgtactatgctgtgttgcatataggataagattatttgtttattatagagttagggacactggtttgttacctggcagatatggagtttctagtatttctcaagttcttcattttttgtttttttcatctgatttgattttttaattttttggattgcaatgtgcatcaatatgcatttatggagctgattccacaggatttcagatttccttttttttatatctatctgcagtttacacctagggcatcaaattatgcagtaattctgtttgaatttcatgattgaatgttaaatctcagactcgtgcacgtgaatggcttttctattctgaagaaggacagtggatggtggtcagaagctctaaagcagctcgtctcataatggtactatgctattaattttataaaattataatttgttcgtattttttgtatgccaaattacttttctaattgaagcttccaagcaaatccatgactttaggtttacttggatgccagccattcggataccagcatggaggagattcaggtagaacatcctcataagttatgcttcatggacgtgccattataacaggttaaccatgttgctttttactgaattgtgtctgttatcccttttcagaaggatttgtctccattggttacgcagttggcacctgcagaaaatgagaatggagctaaaataccgtctgtatcttgtaccagttgcatttttgtgatttttcatttatttcgagcaatgttaacataaatgttcattttttctctcctgtttttctattcatgccaaaacattcaaacatgttccattgtgaattacagtaattactatactgtaaaccattttttttcaggtgctgttgtcatacttatagcatgtttggttcagattatttttgtggaagtaatatttttttgggccaaaatctctttctagaagttggcaaacataggctgaaccaaacacacatttaaacactatgaatttcagttttttctcacaagttcttgaataaatgtctacagtttcatgatggcaagtgatgggatcaaggagcgaaacatcattcacaaggtttgtaacaatatacataatactgtctctattttattattttgatctagtgaactctctgtctgttaaggccgtgagattaactctagtattctgcaagaaacttcattcttaacttcttactgagcttctttttatggtgtttagcccttggttccattgttcattagagggagttggggtcctactgggctcatttcttattatgtttatttttttatccacccgctttattgatctaagagtaatttcacgtctttattctattaagttttttgaaatgctgtttttatcaataagaaacaaaaatgtatttattcactagtctttttgcttttgtgattcctactttttacatggatgctcattctcttgatggctttgcttgatttaaaatgatcccaacattctcattatatcatttatgattatgtgttttgcaggtcccatcttcattaactggatcaattattgttgaagatgtaatttatgaaaatgttgatagtgaagtcagttgtatttttccttctagagagttggtgtttcgacgccttgtatttgagagagctgcaaatttggtgcagtctgaagctctgctaaaagatgaacagtcagctaccaaattggttagtgagacagggaggaagaaaaacaatgcatcttccaaatctagaaaaagtggatctcagagacacagtattggtaattgttttcctcttgcctctggtttatttaaaattactgttcaactcctgtaagtgttgcttcaacattattgtcaaatcccgaatttgttaatttactgttgtatatcataaagtttccatttattttatatttttgtagaattggttttgaaccattgaacatgattgaaatgtgtgtccaaattaatcttagctgtatattttacattgggatgtgtgcatgcctacatggtatgtgaaatttattttcaatgtaaacgtaacgaggcctaagaggaatcatctcttttaatttatccttcattttgctaatttattttcttttaaaaaaaagttgtagacagtgttttgggttatctatatagtttttttgaagcctttctaatgctgaaaaatggttttggatgaatatgatgtttaaaaatggtttaacagaaacagaggatttttacagttttgaaactattcattttctagttttcaatatttgctcgttgtttataactcctgccattgtaatatttttttccgatgttgcaggagcaagcagccagttgaccgtctatcatggctatgtagctagttcttatcatacagggattatttcaggattcacgctaatatcttcttacatggaaaatgtggcatcaagtgggaaaatggcaagtatttctgacttttaatgtgatgcatgaatctactagttccttggtacattaaggactgtagtttccaataatagcaaattgtaaatacatggcaaattaacttgtctcactttcttcagatgctctaaaacattctttcattcattattgctgatgcattcaagtgacatatctcaggtaaaagcagtaataataggtcttggagctggtttacttcccatgtttcttcacgggtgtatccccttttttgaaattgaggtaatttatattttttttcctgttgtttagggaggggatataattagagttcagatttagtccctaatgatttattcttctgaatgattcatatgacatggtttgataataatttttatctacagactgtggagttagaccccatgattgttgatattgcaagggactacttcagtttggttgaggataaacgcctaaaggtagttaaatatacattcatgtcttcctcttgaggtgttgtgggggcgtaaatctaaattaggactaaccaaagtaaagccagattgctaacttacatcaaaggaaatatccacatgaaacagtaactagttttaagaaaagattctccatgcctacttgaatcatacaatgttgactcttgcaagtaattattttgatttcatgaattttttttttttttgctgtttaaacaccagtttaaaatatggatggcaataaaaatatggcaactgctgataaagtgacttctgtttttatttgttgggagggagaagggctgtgtgcagaatactaagaaccacaatataatataagaatttgttgaattaatcttgtgatggggtgatcacaacattggctattgaatcttgttgctttggagaatccaggtgcatgtagctgatgggatccaatttgtccgggagattgacagttctggagcacctcagattcatggaaaaagttcaactgcgtctcatgctggtgtagaagtgacaaaagttgatataattattgttgatgttgactcttcagacccaaggtgaattgaattatgcatttaagacattaaactatcatataatggctaagaaaaaaatggtattagggccattaagggattagaaataataatatcattatcttctatgattttaaagaatcctacttatttattacattttttgtacagctcaggattgacatgccctgctccggattttttggatgagtcttttcttgagaccgtaaaggataaactttcagaggatggtctctttgttgtcaatttggtgtcacggtcccaagccattaaggatatggctctctcaaaaatgaaaaaggtaaaaacaaatgagtgcaataatatttagtttggactttgatttttgatgtctgatgctgtatcttgtttaatcagatatttattacaaatgtgtttaaaatctctattttttttccctctcttctctttgtacaaaactcaaatgcagtttcttaggtgctttaggtattgtttatccaatcatacacaatcgggaaaatttcatttcactcaccttattcttgctaaaaccggtgagcttttcaaagaaaagtactccaaattttgaaggtttaaccaatatttataaaaagaaaaccctcccaaatataactagttgctgggagaagtagaaatgattatggttgttagttatttctgaatttataaaactttacacagacatcgggagacaaagtttagttagatctaccattctgctacacagcattagagtactaatctaatgaaaaatgtccaaatgaatcttttgtgcttataaggggatttagaattccagagaggctagaaaatggagactttaggacacaatttataattggtgtaactcggttacgaaacattagtattttcaatgaaatatttctattactttaaagttgttgaacccttgtttgcatagatgctgtccttatatcttgtttctaaaatttaggacttatcttatatagcgaattgaattgtaatcctttaatataaattcataggtgctgactgctgagatcaattctctctagtaattcttattattctgaagagttcaagctggtatctgagcatatttcctttgtgaaatggcctactgtttttaacttcacaactgtaatcccaatatagtacttagttggttcaagtcttcagattggaaatgttaagatggatgtacccataggtatcattcctgcattgtggcatagattgggatagtgggatgggtgctatgttgaagattacaaatgctatatcaataatttatgctttacgctttattgtttctgtattaaattttaacaaaaaaattaaacttattccttctagtctgatattttatttgtagctaaaatatgttggttatttctaataaatatccaaattttgtgtttgctttctaataaatttgttcttcgttttttcttcatgataaaataacaattttgtttttggtctctgacacatttttttagtcccttataaattagcaattttgtgtttgctccctgaatttttttttttcatttgttattagcctttttcaaaacaaaactcaatgcaaagaaattttttaccaaggagcaaacacaattcggatatttattagtaatcacaaatatattttagcttgtttactaacaagaaacttattattatgttgttgactatataccctggatgctgttgttgtatataaatatttattcagcataacttttggttttgttgattgtggaagatatttaacaccgtcttgtcaactgaaagttatgtttcttttttactgtatttagagtctagttgttctgtaatatcactgttgtatttctgttgtcttacataggttttcagccacctcttctgcctccagcttgacgaggacgtcaatgaggttcattttgctctcaaatctgagtcctgtattgaggatagctgtttctctgaagcttctcttaaacttgataaattgttggagtttaaacacccggagataggtcaaaacattatcaatgcgaccaaaaagatcagacgtttgaagtgaaacttgctctccttccttgccgtcgttatgagcatgatactcttcgtctgtatgatgtgaatgcttgctatctcaaatgcggaagtgatttcagccaagtgtttgtcattgatctgccgattgaactgtctagtactcatcagtagtacttactggttgagtgatgtataaatgacttatgagttatgatgatattgtagcgcattcaccctttatttcatatgggtgtctgcttcaacgtttaagggttatggataacattccctggaataattcgctgtgaatactatcctctaggaattttccttcgttaaggttattttgactagtctttaaaaaactcactggaaagtttacaattcttggaagactaatgctattttcttcatcttactaatctttttaatactttataaagtactaagtattaagtaaaatagtgaatgcatttaatgttttggaaatataaaatgcatttaattcttttgtatttagtaaatagaatgatttgtagaaagatcttgaagggaagatctaaatttatccttcctgaaaatagtttaaaagcttgtccctgtatatgaacaaaattagtattataaatatttgcaactctaggaaattgctttctgacaactattggaaaacctgttttggtgtggagtgaagagttgccgtcctgatgattttttaaaattagttctaatatttttcgttttatgaagcattatgttggaagtacttaaaaagttgatgaaatataactgtttatttttagagtaaatagtctatttatagtttaaaatattttcactatcgtttaattataaatcatgtatgatttattgaattttataataattacttaaaaagttacgttaataacaattataaatcgtgtatgatttattggattttagatcaaagaacccatggtatcgcatgcacaaaggagaatcattgatcagcagagattatttatttgctgtccaaagtcaaaagaccaagtattatgtactaaatcatgacatccagcgaagtgtcatacatatacacaatagggtgaacacaattaaggaccatttgtggtcagtaacattgtccagttggttgactagtgtgaacctctcgttttagaagctgcttacagcctcttgaaagaaaccatcactcaatggtgttgtgcatcttgcctccacagacaacgttttcacaacacctggaaaggggtcaccaccgaatacagagcctgatattttgatggagcaatttcttttcccttggcaagcctgcaaaatatagaaagtatatatcaagagggtctacaacctagaaaagttaggttttgtcaaccatgcgcacaagtgttttgcctgatacagacatgtattagtatggagtatctccacgctgaccgatgaatcatttcattcctcaataaatataatcaacccaaagtttagaaagttattttggacccaaaaccaactttctaaagatgaattgtaaaggggatttgtaatcattatattcataaaattgaatgacaggtaagttctttgcttcagttttatgtattgggccattcttattaggcgagttccccccttttcttcttttggtgaaccgcagaatatttttcatcaaaacattacaagcctgcagctaaaaagacgcataacactacagccctgttttttccaagctgcatatcaacattagccaagaccttacacttaacatacaagttctcatcacttttctagtgcctacagaaatgtttaatcagtgataacaataaatttgtaatcgtaatacttaaacaaagtatagggttaagcattttggaaaatatcttgcatcatcacttttatcgaagtccacaatgccaaaatcatgaggagcttttgctttcttgcagagaactgtgtccccaattcccccccaaggtaatatagtgaagagtgaaaagctacccaatatagagtttacctcagaaactgtggacattgaactaggtacatggcagtttcctctagaaaaattctgaaactacctcctggagtaccaaagctagcaaatgttacggaagaaattgtgtgtccttcttgacaatgcaagtgcagttcaggtatcatattatttgcagaaacttcttcaatgagatctgcattctccaactttttgcaaaggtggatagttggattctgacacttgagcacatattattctggatgaatgtaacttgactgaaatttcaaagggatttcctccagtttcctccaagatagtaagtaaattgttggttgctttcaaccatgatcatggcgcatggaacctggagattgaccaataactcagaagttaaggaaagtgcaatgataagtatgatagtacaataagtgatgctgtattctcctaaaatatctttacaataattctttcaatactttacaaggaaagttttaaattaaaaagctgatgtatttaatataattggaatattaaaaaattcaatattttcctaatttagtaattattaggattggttaggagaatttaagtttttcttgtaaaatgttgtacataaaggtgtaaatcaacaggagacaaatgatgctttgagcgacatttcataattaatcgataaagtcgtttggagtcatatgaaatcatgaaaccaacagttttagctactttgagactacatacaaggtttgggttggttttccacaatttgttgaacacttgtcggaattatatgctccacgataatcacagacttgttgacatccactttttggggaaacccgagtccagtatcttcctatatgttgaccattcacccaagcctgaccttttcccatgcttttcaagtcaagagcaaccgaatctctgccaccagggacatcaaagtatgtctgcttaaaataaataggtgttatttttaaattgttgtgttgtgataaaaaaaactatgtaactcattatccggatgctcctactacatgaaggtaagggaaagagatattgtacgcagtcttatccttgtatatacaaagaagttgtttctgaattcgaataaaaaagaaaaatagcattgggaaagaatgaccagtgggcttaatagcaccttcataaaatctcagtagtgtatcatgattttagattcactcactccgtagttgtgcgttggggataataattacaataaatagataattgaacaatttcagaggcaacacagaacaaacaaatgtcctgggcatatataaaatattcattccaaatcatctgctttccttaaagaacttcagcatgcgtataaatttataatcatcttcttcattgaccgtacactttatattattcatgaatttgtctactgtaggaaatattttgtagcttaaacataaatggtgcatgtttcttgatcctgtgttaatttcatggataagtaaaaagcagtctcatgtctctaattcctccactcaatcaatctgagtattgagctatatctacagcttgttctgaaattatttggataggtgggcttttggctgagcttggattgtctcaaacagctgcaacacatttctatgccgacaatactagtgtaatacaaattgctactaatctagtttttcatgagcacatatttagatggattgtcattctattcggctattcaggaggcattggagaatcaagttatctcctatcctcttgtcacctagcaacttcagcttatggatatctttatcaaggctgttcctcatccacgtcatcagttatctgcaaattgatgcttcctgaccagccacatcaatttgagcggggatgtcaataagggaactagtcattattattgtttcctgtatatattaggaatacgaaccaggtcattcattgtactttgtacacaattagacttcctaatttaggttgtacaaatttggaattagaatttttgtgtcactaacggatgtaaatgaaacctctactatatatggatgagaacagaatcaaagaaaccaagaattcaaaatttcttgacaccttggacttgaagcatggacaatggatggccattttacctcgtgctttgttgaaatgagcattttgttagagaaatatgataagtgagagaaaaaaaagactttaaataatattatcatttattttgacatgaaacaaaatgctaaccaaatagtcctattaatactaatactagattccaaatctaagtaaataacaaaactataacttactaaagaaacgataaaatctctaagaataaagtaagattcctaacaagctaagactcctaaaaattaggtgacacaattattggtataacatgaattatcctaatcattatgcatgattctcgttttataaatattttgcagatattctggcatgcttaaatctagctttatctagaaaaaaagagtgcaactagtatcaaacttctgccttggtcatgggggaaactaataccatgtcaagaatcaactttctaagaagcttaagctcttatggaggttcatgagtgattttatatttataactaatcaacgtaaataacttataggctcttttccttttctattttctttcactgtacaacagttcttatagatatatcacttcaacagctcaaagttaccttgtaccatgtaaatgtggatgggatggcatcaggggccaactctacccattcagaattttcattctcttcactgaaaaatttaaaaaactcaccctaaagcccaacctgggatacaaatgaataaagtggagttagtatttttcaaattcctcggactatgaaaagtacaatctcacaagtatagaaagtgatgatatgaagatgaaaattatagaacagtacaaatttagaataaagataatgaaggtgagacacaccaagaaaacatgccattaaagcagcattttaagtttctttggagtgaaggcagaactagaaagaccaactgacattgaacaaataatcaaaactaagaatactttttccaaatttatatcttttaattaccatggcaaggttgaaatccttaaagacaaaaaaatctcaaataggcaacttaaacaacctattcctacaagggcatgtaacccaaacttaagattcaaaagcctattttatacaggaacatagaatctcaatccaatttatactacggtaagatattgttggaattaggaatattttaggagataagagctcttttaatgtttattttagcaagtagcctaggtacttggtataggtaggttcaatgcatcttaggaagtagtggcatctcctttaaaaaaaaggtagtggtatcttaactattctcttctaaattattttagaattaattatctttgtaatactcttgaacataaataagctcattcttctggaaagaaaacacactcaagtacattgagattttttgccccccattttctcacatggtattaaagatcctaatctggggagagggggtgtttctgcaaaaaaaatggtctctgtagaaggtctgattgggctcttgaagctgtcagacgtccaaaaattctagaattctccagcaaaatttccagtaattgtcataatttccgatgacttttctgcccactgtcagaacttttccctcaactttatctgcctgccatcagaatttttctggtatagctaggtttaatgcatcttaggaagtagtggtatcttcatggttctctggtaaattgtttgggcgttgcttatctttggaatactcttgaatataaataagtccaatctgcttggtggaaaaaacactcaagcacattgagaaaaaaattcctttctcatttgcttacggatattgtaagacactaagaccaaaacatctctaaagcatgaattcccaaatagctcaaaatcaagccctgattggattacatataatcaataattactgcactcatccttttgcagttcttatttactttgacaaaagtggtttattttttaatacaaaaaaattgaaatgtgtcctttgttgctgaccctaattattttaaaggttaaagagccaaaataacagaaatgagtatccatatcacagagcacacacacacactggagagaataagagagtgaacctattgaatggaaatacacaaatgtttggcttcagtccttacaatatttatactaactataccggtttatttacaaagagagtgcttctggagtatacctaaatagcttatgtacacctagtacttacactatctatggactaactaattgactcaccctagaaaatgtttgctagttggtcatttgaattcagaagaccaattgtaatatgtccagattccagaaggtaccatgtagaaaaccagagaaagagaaaacatgtgtcttgggccggtgtatttactgtatatttactaactgtacagatttacagaatacatctgtagtgtactacatcaaatagtattttcctctaaaaaccagctaatatttcatattgttcttttggatcagtttagggtttaaatattatggacctgataggtccataatgattttgaaagatctatatctccattttcgaatcctgtgatctttattttacctctaatccctgctccatccttctcaagaaaagcgccacaattctgtaacattgtttcaaataagaatatatgtatcatcagtaatctttatccctcaattgtttgataggagagtaagttaaaagaagtagaagaaaatagttataaaagtcacaaagcatacagatggaaaggaatatgctgttaatattaatgttaacacattggataatcctttgtcatcaattcactaatgaacgagcatacaaataaagaaaatcatttaacaactgtgttgccttaattgcggacacccttggcctgccttaatttgctgtctcatgcatctttattctgataggtgtgacgggtagatatagacatatagtcctacattgactaaaaataaggctaaattaatgtttataaaatttggacaatcctcgtctttaagtcaattttgttgggtggaatttgatcctaaatccaaattctaataagctgcaataaaagaatggactaatgaaactggttaatattttatactactgctgaaaaaaggaaaatgtaagaaattgaaagcaaaaaccagagttagaatatgcatagttcatattttgatgaactagggctgaattcttacatttatattggattgattcaattctgttttggtggcctaatcagaccaattttattattggaccaattacgcaattgacccgtaatgacctggtcaaatctgataggttaggtcaccaaatccaggttgaactggtccattccatctggtttaaaaaaaatgaaccatctctacaatgttgttttgatgttttattattatcaattattattttggattttagaatataaatgaacttttcttactcaaataatattagttatatatttatatataatagatacatatataattttagatttttaatatttattaagtcaaatcgagtcaattactgatccatcggttggaccagtaatccattatctcgactgggtcaatgatcaaactaaattttacaattatacttccaaaacattaaattatttatatctaagaaaaatattatgtagacataataagtaacattacgttcttcaataattcttactttgtcgttactaataaatctcttgtctaaaggaactactttcataaccaatgatcaaagaccataacagtagaattatgaaattttacacaattgccaaacacctacacaacacactatacacaattttaattgtatccttatgtataaggttttggcattatgcataaggatacatgttaaaaatatactaggaatttcacctgcaaacccactgtttgagttaacagtgttaaataaagtggtgcacttttactttcaaattataagataaatcctttttagattgagtttttaaataatttgataaataaggtgttaaggatcaacacaatgaatcgataaaattaacataattgatagatgattgaatttttcaaacataacatgttaacaaaaatttgattttgtaattatgtatatgaaaaaaaaatattaagagaaacaaaatcacttctactataaaataccttactcctagaaaaaataaaacaatatgcaagtgtgaaatactatttgatcaaatccaactcctacataagtaaaaaaaaaaaaaaaaaaaattaagtagtacaaactttacaaagttgtaattacgtaagctagctagcattagaggatgcaagaaatctcgttgcaaagtaacagaaaatagaatagctaaaagcgtgaacagcaggattcgaacctgcgcgggcagagcccacatgatttctagtcatgcccgataaccactccggcatgtacacaagactgaacaaaacttttcatattttataattattataaattacagatatacaaacccaaaaacaaaaatcatctgaaaaatttgctattattctggaaaataaaattggtcgggaaattttcagtctcagctttgaaattttgcaagggaatcgaacacggttgtcgatcccttagtcagctcctcgtcacttcattcgttccccagtgacttattatttcgatattattttcttgagaaaatttcactttccgggaaaatcactccgctcctcctctccctccgaaaaggtaagcaagctccatccttcttctttttccttatttttacagtttcggagagaatcattcgattggttaatcgcttggttaaaatcgtggattgaaaaagcaaaaaaataaaaataaaaataaaaattgaaacaacctgcacgatcttcgcgttctcgatgcaatcagaatcgctatcggaaaaggttttggtgctcgcggaggaagaaaaagacgaggaggaagaagaagaggaaaaacatcgcgagagcgtcggcgtagagattattggttaccgatgattcctcccaggcggaagaaatggaccgaggcggaggagaaaaccctaatcgacatgtacggggagatggtggcggacggttcgctggcgaagatgcggactcgggagaagaagttcaagccgattgcttgtcacgtgaattcggtgcaccacgtgcgcgatcccattgcgtacccttggcagtggagttggaaggacgtttcgacgaaggtgcagaacatgcggcaccagtatttgcttgtgaagcagaagatcaagaggcctgagttttcggggtccggaggaggaggggattgtgatgaggggagtgagtttgattgggtggaggggcttactcattggtctaacttccttaggtataaggatgtgtttggggatgttgcacttgttgttggtggtcatggtgggaatgagttgatggggattgaggatggggatcacggggatcgtgatggggataatggggatgggtttcttgctggtggtgggggatggatatggttgagtttgggcagatgggtcattctggggatggggattttggggctgctttggatggggtggacaatgaggtgatggggttggaatttgagattgagggggaggaaggggaggtgaattacaatgggagtggtgttcgggagagggaggatgctgcggagaatggttttgtgtttgaggaggaaggggaggtgacggggtcaagtttgaagaagaagaggaaggtggtgaaggggatggagaagaaggcgtggcgaattcttgctaaccaactggggcagttgagagagatggagacgcggttcgagcagcgcgaggtggagagggagcgcgagaggcagaggagggagaatttgcgagtggagcttgataagcagtgggaaaggaagcttgaagagagggaaaaggagagagaagagagggagaaggagagggacaagcttaggaggcaggggatggcggagtgggaagccatggaaaaggaaaacggagatatggaaaggaaaaggagagaggaagagttgattcatgagagggaatgggaggagagaatgaactgcaggaggctggaatggaagaagagggttgacgagatgctgagccagcaccgagcagaaatgggccagatgcagactcgttttcttcacgagcaacaaaatcttactaaccaattgcttggtatattctcgcagtggcctgcccaacctgctggcctatctgatcatactagtgctagcaaccattatctttcacaaatgatgcaaaatttgcatcatgtgaatgttcacagtgacgctagggttgagggagataatcaagaagatcaattcattgttgatggatgatgtatctctgccattttgtttatctgtgctggggagtccaggaacatttctgttacaagaagtggcgaaaagtgcatataattgttgaatgcattcttaattggtatttcttcagttaggtattgttgtatactatgtttagtttataatattttagtgtaactaatcgatataaataatgctttttgttccttgtgttcgtctgtactgaactatgaaactcagaagctgcgagtgtaaaggccacattttttgtccaatacatgctttaatgcttctattcaaaccatctattatctgaagcctatgaaaaaaatattcaaggagtaattttctgttggttctttaatgtgcaattcaattcattgtaatgctaatgaaacaacagatgacatctaggcttattcaccctttgttattgtttcctgctatactttagctaagttcatgtcctatattctttccaaatattctgctataagttaatccttgccttgttttaacccttatgcacatgtcagatgtgttactgtgcgtttggtaaaatgaaaatttaaagaggttcttatggggtaaagaaattgagagatgtatttagatatacatttaaatttaattatcctttttcctcacatttttattcttacaaagctcacctatactctggcatgttctgctgtgtatctttagttactggatcttcttcatatttgattacaagattatagtaggacatatgaatgaagttgattcataattttaccataatttttatacttttcttttcttttcatgttttgataaatgtttattttattcaatattaataattggtatacacacatctcatgccgtaacagaaatattcctgtatacccacctgttggtacccataccaatgtgaagataaagataatgggggtgagtgttcgcaagcaatgcccattcacaactttcagttctgtttactagagtttcatattctttgttgtttaaccacgagccataacatttacagtaactaggttcaactatttacattgtctttcacttgcaaccatgtttatccctatattgatttgtaattatcaaatgttgttgcctaatgataaagttggtccacatattccaattaagtttggataaaatttcttaacaagaatttattggtgaagaaaataaggaagtagaatgagtcgactttcaactaagttaaagtgaatttatacaccttaattttaatttttggagaagttagatgagagaaaaagttcagggatacaatactttaaacttacaggaaaaaatgattcattgatgttcacaatttcttctgaaagtagacttacatcatggtaacatgataaaataataaaattataccaactctccaatttccgatcaaattgttgttcgtgggagctttactttgagaccatgtattcttatttgagaacaattatgcatactaaaagccccactttgagaccatgaatttttaaattagtttaaagtgatttttagtatattatgtttaataattatttcacttttatatattatgtttttaaaatttcattatggtgttttatgttttaaaaatatatttttaaatttttcgttaaaaatgttagtgtttgtcaatgttttaaattttaaaacagttaagttaatatgtgatgactaaaaattgacactgttttttttttatttaaaaataaaaatcactaagtaaatgaagaaaagatatacttaaaatcacgaacaataataactttcactatgatattattattattgttgttgttgttgttgttgttgttgtttgttgttgttgttgttgttgttgttgtttgttgttgttgttgttgttgttgttgttgctgctgctgctgctgctgctgctgctggtggtggtggtggtggtggtggtggtggtggtggtggtggtggtggtgttggtggtggtggtgttggtgttggtggtggtggtggtggtgttggtggtggtgttggtgttggtgttggtgttggtgttgttgttggtgttggtgttggtgttgttggtgttgttggtgttgttgttgttggtgttgttgttggtggtggtgttgttgttggtggtggtgttggtgttgttggtgttggtgttgttgttgttggtgttgttggtgttgttgttgttgttggtgttggtgttgttgttggtgttgttgttgttgttgttggtattgttgttggtgttggtgttgttgttggtgttgttgttgttgttgttgttgttgttgttggtgttgttgttggtgttggtgttgttgttgttgttgttgttgttgttgttggtgttgttgttgttggtgttggtgttggtgttgttgttgttgttggtgttgttgttggtggtgttgttgttgttgttgttgttgttgttggtgttgttgttgttgttgttgttggtgttggtgttgttgttgttggtgttgttgttgttgttggtgttgttgttgttggtgttggtgttggtgttgttgttgttggtggtgttgttgttgttggtggtgttgctgttgctgttgctggtgttggtgttggtgttggtgttgttgctgctgctgctgctgctgttgtcatcatcatctttattcaatttaattacttaataacgataataattacattcactaattattctcaatcacaatgggtaagggtccatttttcttttgtcgatccacctttcacgtcaacgcataaagactgttgtcttgccctcacttttgtctccattgcaacctccttatacaactgaaatttttgcctcacctaacaacaactgctcattaccatgatggcagtagcgcgttgatgaaggcgaagaagaatactgacaatatccagttgtagatgaggtttgatcagtcaagttagatataatcatcttccaaaaaaatacaccgtttgggccctctttgtgctacttgtcttcgctcaacccaattgtagatgtcaactgagaaatcctctacttgtccaactcaaacgtgtacaatagtggaggttttgctcgcagatctcacaaagaaccacatggtgacttcctcattcaaatatggattaattggggagttaggaccatgtttttgtctttcgccgaagagaactcttgctccgatctaccttgcttatgtttcctatagcataattgtgtgaaaggttttggtttctagtgaggagtatacagattttcggtggttctaacaagattatgtgttgacgtcattccatatatgtgatgctgcacttttttttttacctttttagatctagaagaggttgaagaagatgataatttttttagttatttattttttaagaataaaacaaagaccgtggcaatttttagactccatcgtgtaaaattaattatcttaaaatgtttaatgctacttttgattcattatattttataattgttttactttgacacaattttaaaatttcattcttgtcctttatgttttttaatgtatcattttgatccttttaaatttaaaaattatcgaaatactaacatttctaacgaaaaattgaaaaaaaaaatcaaaatgatacatttcaaaaacataaaagacaaaaataaaattttcaaaacttaattgtgaaagcaaaaataatttataacataataaactaaaggggaaacgaaaaacaacaccgtgattgaaaataattatttttctaaaaactctttttaaaaagcagcaatagaaaagtaattccaaaattatgactagcaattgcaaagacgtacggagaaagaaaaaaaaaaaaacagttatttgctgatcattaggaaagaaaaaaacagaaaaaatgggttggtataagtataactataaggggagagtcagcagtctacttagacatgcggtgggtgcacaccacaagcccagtcagaggaaggaagcatgccctgcatctaccttaatgtaccttccctttccaattcatttggttggtgagtgttgaaggccctgccactgtcatgactattggcaccgccactcctcccaactgcgtcgatcagagtacctatcctgactattatttccgcatcaccaacagtgagcacacatgaccgaactcaaaagaaaagttcaagcgcatgtgtaaggtatatctctctctcatttagcctatctttatttcattatataatatgtatgttgtttattttcaacatacatctttgatttgattagtaatacatactaataatacatgataagtcaatgattaagaagcgatgcatgtaattaaaccaagagatcctgatggagaatccgagtgtttgtgcttatatggcaccttcattggatgcaaggcaagacacggtggttgtggaggtaccaaagttgggaagagagactgcaactaaggcaatcaaggaatggggtcaacccaagtccaagattacccatctcatcttttgcaccaccagcggtgtcgacctgaaaagctactagacatgtgctgaatatggtaatatgtcaagtgcatgtgtgctattcatcttggatcagatgagtaacaactccatagaaaatggacttggcacaactgttgaaggtcttgaacggggtatgctatttggttttggccctggacgcactattgagactgttgtgctctttgtgtcattgtctaatcatatatattgtatttagaaagaccaaccacaaatccttactttctttcttgttagagtttaaaaaatgtattctttctttcctcatgcttcttttttatatcagtaaataagaacgtatcatattattattaattcaattaagcttacagacaatttatctatatatacaattgaggaccagaagtcaagaacttttttattagaaactaaatataaagtccaaaaattaattttaatttttaggaactaaaatatatttaagtcgatctttaaaatttattataaaaaatagacgtttatctttccttttaagaatgaaatgaattgtaacattattactaaacgttatcaaagtcatgagatctcacatctttgaatgtttatcccacttcaaaatgctggctctaaaaacaagaaaaatgaaccagtcatttggatacacaagctcaaactatacatcatgacctcaagaaagaaaattcatgactcttgcacattaaaacagaccacaatctctactaccattaaagaatcatatccttgatgaaattccaaaaatagaatggtggcaaaacaactttgtattatgtcaagcaatatctctaatagagcattagcatctaaacgcaatgacaccgaatataattgctctacttactactaaatcccacaagtccaagaataattttaaatcagatcaagttgcagattaagagataaaagaaacatattatttatttttcaaagaaaagtcatacacattttcataaaatctatggcaataatattacttagttgaattaaagaaactcaaattatatcaaactaaaaaaaatgcatataaagataatttatatttattcgcatctcacatcctaaaatgacaaatgaatataaatataatttgcaccaataatgcaattatcaaaatccctaattactttataagttcactactgctacaccttaggacagaccacaatatatgctaagagtaaagaattaatcacaatttaggggtgaaaatatccgcgtccactcatttgatgagtcatgttgtttgatggattcactccactcatttgatgagtcatgatgttgtttgatggattcactccactcatttgatgagtcatgttgtttgatggattcactggtaatatttgttgcatttcatgaacttgttgatatgcaatatcagaatcaaatcccctcatttgatgagtcatgctatttggtggattcagcggcatttgttgcatttcatgaatttgttgatatgcaatatcagaattttcaaatccactcatttgatgagtcatgttgtttgatggattcactccactcatttgatgagtcatgctgtttgatggattcactagtaatatttgttgcatttcatgaacttgttgatatgcaatatcagaatcaaatccactcatttgataagtcatgctatttggtggattcagtggcatttgttgcattacatgaatttgttgatatgcaatattagaattttcaaatccccttgtttgatgaatcatgttgtttggtggattcagccgcaacatttgatgtatttcgtgaacatgttggttggcaatatcagaatattcaaatccactcatttgatgaggcatgctgtttggtggattcagcggcaacatttgttgcatttcgtgaacttgttgaatgtcttgatctggatgaggaattgaattatgtggatcaatgtgatgaggagcgctatttgtgtcatctaaggttatgtcatgaatgctttttcttgtttttgttgacgatgaggcattttgacgattgaagtatttttgagcatgactggcaatttgagttgaagattttgttttaacaacatgccttgaaatttttgtccacgctcccttcttatatgtttgaagcccaagtaaaaacaacctaccattaaaaaacaaatatgagatgaaaatttgataagttttagttcatttgagttctataaaatacattaaaataatacaatccaaatgtttgataagcaagatttttcacaagggattttggtctttctctataaatttattaggaacaaaatttgttctgtgcacgtctaaacatttcaccagaattagttgaaaagtaacagcaaattgagaatacaacatataacagaaaaataaaatattaaaaatccaaacaatgtaatatttgtattcttcaatactgagaacacttatgatccaattggaggctagtgaaaactacgaatcgttaaaaaaaagttgatatataaccaatgaaaacaatatgctcaagtagacaatgtgggacattttcatagaatattcataaagcagttcaatctaattaaattaaaacagaaaaaaataaagaaagcaaaattatttattagattggattagatttcagagtttattttgaaaatcaattcatttattatattcaatatatatttataaagaaagtaaaactataattttagattgatccaattcaaataaattttctccttaaaactagtttgatccaattcataatgatcatagtctatttgaataagattgactaaaaataaaaaatgaaaacagatagcagatgtccatactaaaaatccaatccaaaaacacccaccatttggcttttgcaatattatccaaaaattacaacaacgttaaaagtctacctgtgttcttcttcagtccatgcctcccctctccctctcttgcgccgaaccgatgaacctgcatcattctgcatcatggaaccaccaccaccgttatgcaccagcgcctcaactgggtggctgggcaactcgaccggagccgacacaaactggttcacgtggtgggccaatgtgtgatggtgctgggtgtcctccgccagaggaacctgggtagcaacgttcagcgatttctggtggtgttgggtgtcctccaccagaggaacctgggtagcaacgttcagcgatttctggtggtgttgggtgtcctccaccagaggaacctgggtagcaacgttcagcgatttctggtggtgttgggtgtcctccgccagaggaacctgggtagcaacgttcggcgattcctggtggtgttgggtgtcctccgtcagaggaacctgggtagcaacgttcggcgattcctggtggtgttgggtgtcctccgtcagaggaacctgggtagcaacgttcggcgtccaccatgcatcatcgaggttctgccacggctcggtgtcgaaatcaaagaactgagtgtattcataaacctcatcattactcccatcgttattatgttgctgaggaaacccagacattgttttttacttttatcagcttcaaactctcaagtcaatggcatttcttttcgtaaacacgggcttcttattcagagcccttacgctggtttctttgaaaatttgccgccaagtcgcatttcatttaattagtgtttttaggagccaacgtctattgatataatagataaataatttatcttctctttttgaatttgaaaatatttcctatgaaaatcttatcattttaaaacttttttgaatttaatatgcaactagataaattgatattcagttgaaaatttaattttttttgtctttcaaattgcttatccaaagataacaaaaaggtttatcttaataaatttacttatataaataataaataaataaagtggcggttttttataatttaatttgattaaaactattaaaattttcacgtaatgccttcatgttaaattgaacagaaagaatcacattaaaaaattttaaaaaaaaactaaagaatcgtgttatggcatttaaaaaaataaagggcttgattgaagctttccaaaatagaaaaccttattaaacattctacataaataaagtgatcaaattaataattaagttattggttaaaacttaaacttaaactttgggggataacagttcattaattgtttttggagcgaaagatacggttgaaaatattttatcttctttggatttgaaaatatttcctataaaaatcttttaattttaaaaaaatttaaatttaatatactagataatttgatacacggatgaaattttaattaaaactttttaattagtgttttttggagccaaagtttattggtataatagataaataatttatcttcttttttaatttgaaaatatttcgtatgaaaatcttatcattttaaaacttttttgaatttaatatgcaaactagctaatttgatattcggttgaaaatttaattttttttgtctttcaaattgcttatccaaagataacaaaaaggtttatgttaataaatttacttatttaaataaacgagaaattatagtagtacatttttaacatgttgttttaaacacaatattgattatcagttaaaatttattagaagccacaaattaacagtcttacttctcatttaaaaactctctcaattttttggttttcaataaattttaattaatactacatatgtgctacaaatagtgtgttattgagtatattgttaatatttttctaaataatgtacataatatattattatataaattttattatcatcttttcaaattatatgtttattaatctattaaagtttaaatttacataattatattaattaacttatttataagtaatttcaaaattttatgttaatattatactaaaaagtgagattttaaataagtttttaagacgtataagactttgaaaaagtaaaactaaattttaaaataatttatataatataattaaaccaaaattaactctgatgtttcaattaacagactagctagccacaaatctttcaaaatccagtcaaccaaagttgattttccttcctatccttacactgttgtttaaataaatgcactgcattcatcaatattcacctatttttatttcaaaatctcaaagttgacaaaaaaaaatagatttaaaccaattaaaatatttcaaatgattgaatataataaaaaaaattaggtatttcaaaattaatcaatccaaaaaaattagattgatttcattaagtaattggatagaattttttaaatttttaaacaaaatatattttagagtttatttaaaagataaataaaatattaaaaagtcaccaatattattaaaaaaatagaaagggaaaagcatggtttggtatatttgaatcaattggattgaagattttcaatatacgacacccaagttaatatatatataaaaaaaatatttcgtatgagaatgataatagtcattttcattagttagattaaaataaatgattaaaattaaaatattttaaatttaaattaaagtttcatttaattataaaatttctataagatttaacctaacaaaaaatcaaatattttaaacaaaaaaaaatggaatagaagaaagaaagaaaaatgaaaagaaagataataaaaagaaaaaaagaaaggaagataatagaaaaagaaaaaaaaggaaagaaagatgataaaatgaaaaagaaaaaaaaaaagggaaagtaaaaaagattagaactagacttttaaatacgtcagacaaagtctaaagaaacctataacaagtaaataagtcaagtcaggtttatgtatttaaatcatgcctaagcaagtctaatctgatctattttcacccctacttctccttctcattttttctaataaagttacactctatttcggtttattttctgtgttttaattgttatgggcttagtcccttttagatcctgagttaaaatagactttcacaatttatttcaaagaatccataattaaggaaaattgaggaagaagcaacaacacaaggatagagattgaggaggattcatatatctttctttttccttttcgatttgaatgttcttgtttcttttttgtgatttttttttctattatgattgagttttatcttctattttgagattggacaattaccttgatacattaaaaaaattacataacccattgtccataagctccactttatacacatataagagagagatattgtatgcattcttatcatatgcaaagagaatgttttgatgatacattaatgattttaaattaattgtttcttagtttcttccattttgttaatatttgaattttgttagtttgattcttattgagcacatattaaaaaattatttgagaaaataatttttttatttatttaaagaatgaattacatgatatactaaatgttggtcaagaactgtacatcaaaattcatgagattaactcatatatccaacccatgtcatgaaaagtgaatgttaatttttctctacaatccactactctgttatgggtatgctttgtgtgaataagaccacattcattcaaggtattgctactttattgtagtcatcaataaagtcatgaaaatacctttttagtttttattctttggttagtcttatcccatgcactgatttgcaatcatttcaaaaatcactttcacagaacacatctcatcaaccacttgtatcaccatgtatgtcccatctaagaattcaatggtttaaacttttagaagaagggactctaagattgtatacaaaaaaatatttgtataaaaccacttttatgtaattatatctattaaaaacatcttttattttgaaagttaattacaatttcagctcttttccaaaatgctatttacaaactagttttttttaaatatatttataataatgagaaatcaaattatattgatgtaattttgacaattatcacattatatttataacttgatatagaatatgatttttattgatccaaccgttgaattatatttatatatgatcaaaatcatgtatgctaactaggtatatggaacttgttgaaatataatgtaaattttatcaattatatttacatcacctatttttatgtaaattatatttaaaccaattattttatttcaaattaacatatgatgtttacattatatttacattatattgtatgctaattacattatatttacatcacctatttttatttgaaaatctcaaaattgacaaaaaaaatagatttaaatcaattagatatttcaaaattaatcggtccaaaaaaattagattgatttaattaagtaattggatagaatttttttaatttttaaacaaaaaatattttagaagttatttaaaagataaatgaaatattaaaaagtcaccaatattattaaaagatagagagggaaaagcaaggtttggtagagttggatcaattggattgaagattttttaatctactacaccaatttatcatcaaattatcagttagattaaaattaaaagttaatattaaaatatttaaaattcaaattaaaacctcatctaattataaaatttatataagatttaccaaataaaaattttaaatattttaaaattttaatatacatcaagatattcactacaactaacacaatcttctcaaccacatcagatgattattgccataccattgttatagccaccaacaccttggtgatatggagcttgtagattgaagacttgagatgttttggaactcaaaagaatttggatttagtaaaggaaatgttgattaccagctcaccaaactacaaggccttcgtccctccgtcaagcatttacatgatgtaccaacaaggctgctttgccaatggcacggtgcttcttctggccaaagaccttgccgaaaacaactagggtgctagcttgcttttcgtttgttctaagatcaccgcagtcacatcttgcggcccaacacccatattgatagccttgtgggtcaagccttgtttggagatggtgcagcttgtcattgttggatcagaccccttaccaattgaaaagcctttgtttcagcttttctggactgcacaaactatccttacactgaaggggctattattggccatcgcgaagttggactcactttttgtctcctttcctggattcatctctaagaatatcgataaggccatagttgaagccttccaacccttgggaatctctgattacaactctatcttctgaattgcacacatgatgtatcgccaattttagaccaggctaagttaggcttgaagcctgaaaaaatggaagctactaaacatgtgctcagctagtatggtaataatgtcaagtgcatgtgttattcatcttggattagacgaggaagaaatctacggaaaatggacttcttgaaggcattgaatggggtgtgctctttggttttggttttgtcccggactcacttgagactgtcgtgctccacactgtctaatcaaaccacaaattcttttatttatttatttaattatttttatcttttcagattgaaaaatttattctttcttttcctttgttcatccctgcctgccttcctcagtcacatgcttgttttcttttttgtatacaagtaaataagaacatgtcatataattgatttatacagttgcaaagtgaatagttttgtccaatttcatcttcattgaaatgttgtttgttacttactataatttgaactgtagaactgtgtgaatctgatttatgacttaattgtgtaaagagagttgtgccacttaacttggtcagctttgccttaaagttttgtgtatcgttatatatctatctggctgagagagaaaattatacataatggttcgataagtattaaagacataatagctaagaaaatgtagttccaataacttgattactgaaagaactaaatcatagtcgacacaaaatgtacggacagcaccttgcattattgagcttaccatagttaactgcttcaccactttatccaaggttagaattagtagagttatttcctgagatgtatggactggtccttgacaaattaaatatttggttaaatcagtatatagagttattttctgaattgacagattagatttgttgccattaatttaattagaaataatttaatattttcttagtgtatgaaatgaaccattaattagatctgtatgaaaatatatttttcttttataaacgtaggtttgggacctcagaacataaatccaagcatagtgttagcagttacaagaggcttgtgtggtggtcctctgtagaagaaatcatgcttttctaaaccccacctgtctaatgaatcatcttcctttttcctaacttaacgatgcaataccatacagtgttattcaagtctgctccagactatcattttagttagggtcttaggttgtgcatgttatccattcatgaggccctatgatgcacataaattatcttttcactcaactgaatgcatttttctggggtattttgcactacgtaaaggctgtaagtgtctctcttgatagcaaattctacatagttcatatcaaaagatgtaatattcagcgaatctaaaattttcctatcagtccttatttttcaactaccactaccccatcatccgcattctctttacctctcccatacatacaatcttttcaccacttcatctcaccctcgttttcatccttcacatacaatagcctttttttcctcctcaacctttatcttaagatacatcatcatctctttctatgccttcatcttattctactttctcagatgtgttgctaatcctcctccattggggctcaaaagtcaaaacatccatcctatgcaaacaaggtctaagtaaggcattcacaagcccacactgttaaccactctcattaaaccttcttcaatcaaataggctatgtaggatgaatattctacacttactgttaaaaagacttggtccctggttcctcttcatcctcactgacaagttgtaggttgtaaatgtatctttcaagtcaaagaaaaccctattgggtcaattaaaaagtacaaggcccatgttgttgcaaaaggcttccactaacagcatagttttgaccacactgaaacattctcacctgttgtaaatcttgtcacgattaagatcatgatcactcttgttttcactgacaagtggacaattcagcaacttgatgatgcattcctaaatggatttcttgttgaagaagtctatagggcttaggcactgggctttgagactgctggcaagctgcttgcatgcaagctacataaggcattagatgacctgaaacaggcacacatggcgtggttttaaaggtttactaactttgcttctaaattactaggacttgattcaactcatgcaagtgtgatccatcttttctttttatactaaccacttccccaacattgcacataaattctagtgtatgatgatcatattttaattactggaaattctcgtgatctgattcaacagtatataaccaaactaagctccatatttgcactcaaatactgggatactttggactgcttcttgggtatggatgtcatgtatctcgaaaatgattctatttttctatcttaaggaagatatattagagacatttttggacaaagctaatatgtcctcagctaaagttaccttcaccctatgcctaaaggctgcaaagtgcaaactctaacaatttgtacctgattttctccaaaaccctcacctctataggtccatctttggtgaaattagctatattgtgaacaaaatatgtcaatttctctctcgaccactaggtcattggaaagtggtcaaacctatatctgctagggacccttcaccatgggctaatattgcaacttgtttcaagtcccagactcccctcggctggtcatttttggtttttatgatgcagattgcgcttaagatgatcatcgttccacatctttgtgttctacatttattttggcccaaacatggtctcttggtggacaaacaaacagcctttgttgctttctcaaacgtataggctgaaaattgaaatctggccaacaccacattagaaattcttggatacagtctcttctgcatgaactttaccttcctattacaaccccctacgtttgtttaccacgacaatcttaggatagtgtccttgactcgtatcctgtcattgagatctaagcaaatggagttcaatctcctttttgtcatagaaagtgtgctgaagaaagattgcgccttggtcagattgtgtgcattcttaccaaagctttggaaagtactcgatttcgtgaattgtacaccaaacttagagtggttgatcctttttctttagctcaagtcccccttgaatttgaggggggaatgttaagagtaaagaactttctagtgtcttaagaattttaaactctttatctgatagttgctgtattagatatctgaaaactgtcaattactatgttatctcagctcagattcaattagtatatgatcttgctataagcatacataactatatcatagtataatgaaaatgagtaacaaattatcttaatagtaatttgctattattttctaagtttctatttcactcttgaatcaaattaaatttggcctagctagaagagaaattcttaaattgactttattcttttttaaagatctaaatatacatgtactctcactcaaataaatatttcatttttttttcttttactcgtgaatcaggacaacattgaggtatatgaagaccataataggacctgcaaattgtgatctcatattaatgaagactaactttagagtattagctattcacaatttcacataaaaataagctgctcagaaattgttaaagggaaaaaaatattacaagaaactaaattgcggcattattctctaatattgtctgaaatgcttcttgtaatcttttacgcttcatatttctgttttgccttttctgacattacaagcttgttagaaccatccaataccactcattcactgaccttcttctccttgaaataccatagcttaatcttcattggatttgaaagctgtctgcttagcttgggaacataggtgaaataacattgtcgtccaggccagagttaaaaaaaaaggcatggctattaagtccctgagtgactactagaatgttgtggagtactcataaaaacaggagactctatgggtctatttcccatatctttggttttgtgaagaagaaaggtcccagataaaattgtgacaaagccacaaacctcagtagcaatttgagatgcatcttgtgtgtcccattcctgtagcaaataaataaagcagaaaagcagataatgacttgcaatccaattgcaaacttccgacgaagatattatttaagactcataataatacagatgagtctaacaagacaatagcaataatgataaatgatcaattgacaattgtagacgttaatcatgccatgaaatatactgtgagaattaaatgtcatttcgttttttcttaaaaaaaattccttaaaataataaaatagaacaataacaaataaacaaaataaactttatgtgttagaattttcagctattaagtactagcaaacaaacacgcatgcttttaaaacaaaatatgaaattacacattgatataatcttaaattcagtttgtctgatttaatagatcttaggtgtccaagttcttcaaaacttgtattcaacttgatattattatgcaagttaaattctagttatgattggtccaatactatggatgactaagtttctcacactttcatgtttctcatttcagttttacttttccctgcacaacaagaaaagaggtagtttgtgttttatttccataaacaaccatatgtctatatgaagagttgataagataagtgatcgccaatagttaaaactaagtagaggaatactaatagaaactccaagtaaaaatatattaaaatgatttagatcctaaatagcatttttgaagaattggttttttgacaaaacacaatgatatcttttgattcatgtaactgattccacctagtggaaacaggcttttgttgttgttattgttttaaactactatatgattgcatagtttagtagcatcatcaggtacattttaaacaaaagtatatatatatatatatatatatatatatatatatatatatatatatggaatcatagaaggcaatttagttaccttaaacatgattatgctggcaaagatggtgaatgatgtaaacatgacatagtaaattggtgatacaactgcagtgttaaaggtgtccaaagcctgaaacatgattccaaaataaataaaatagcattacaatataattgataactgataagcatattactaattcagcacacttatttcaatgattctaacattattggttttaattattaaagaaagtctaaagcgaatactaaaatgaagttcagttgtaagttagttggaaatccctaatgtaaaaaatatggcatgccatttctaaaatattgcatgttaagtattactcatctataacggcaaaggaaaggaaatgaaatagttcaatgccaattaagaaaaacaatacaaaatcttttgtttataacttttcgaaatgccacgaactagattagaaatgcaaacatggtcatttagataatgatagaagtcccaaagattgcaaaagcatagttaaatttcttaagcattacaaattaccacctaatcactaaggtcagagaaaaatcaaaatagtgttttcaacttttgcactccaataaccaataaaaaaaattaaaaatatatttaactttgacataattattttaagttgtactttggaagacatattacaatgactgccaacagtaaatgtactaatatatgtaagtcaaagtttaccttgttcaagtagttaatctgcaaaagacaacatcctatcacaataatcgtaaagaaccaggtctgaaagtaaatgaattggttgttgccttcaaatgttaacttcatagctattgacactgctttcacactcatgacctatgcaacaaggaacaacattaggtttatcgagggtagttttattgtgacctacatgacacatatgagcattgaacacataatcgatataccgtaattgagcctgtgagagagcatattccaacatatataaccagataggttggcccatatcgaggagcacaatagaaaataaggatgcaaaccacaaccacaactatacacatgtagattagaaagcctgttgatgaaggaaagaactcaatgtcagcttcgttaaccataaatgaatgccttgaatctattaagaccttaatatgcatcccactcatcttgtatcctcctactttgattttttgcaagattcaatggtaaaagatatgttgaaaccaagcaatcaggaattgaatattacctggttctgtagcaagttgccacacttccttaacagagtgaataactctttcatggggagcatgcaacacaatagttgtagatcccaccatacaaagagcacatccaagcacaccaaatatgtgcaacctctcttttaagataaagtgagctagtattgcactgcatcatgatattagtttgtaactttctaaaatgcaagcagcacccaaattaaaatttgatgaatgaagatgtgcatctacatctgtgtcaaagaaagcagaaacatcctaataattaatgttatgaagaataccatgttccttacctgaaaatgatacttaaagctcccaaaggagttacaagtagtgcaggagcaaatgcataagctgcaaaattggctacttctccaacaatcactacaaaaatgtaagcatacatatagaattagttgatgaaattttcataagattgtcggggacattagcaagttgttatttatagttacagagttctaagagttataattgaaaatttgctctatgaaatttatatgtagcacaaaatttatatctatgaaatttatatgtatgtacaaagacatttgaatccaaagtcaaggaaacatagtcaaagtattagaacttaaaagttaaaagtaataaaaaaattctttgtcttagaagaattaaacttaaatcagttgggttcaagaatttttggtagtccactagacttgaaatgtgatagaaattattctgcatcactttatcttttttcactctccattataatcttaattgtaaaatgtcaaattagctgataaagacaacaaacgagacaccttttcaacacaagcctatatcatgaagtaatacaataaatacaaacagaaaattaaagatgaattagatcaaacatgcaatacaatgggtcacaagaaatcccttttaaattaaaataggtagcttatgattaggccttgtcaaatgtgtttagcaggtaaaatgctacatgatatattataatttagtaattgcagcaccaaaataatttttaagaaaaaaactaaaaatcacatactagagatcattccaaaccaccaccaaggttcatataggtatgcatgtcctcccgcacctgatcaaattaaaacaatatatatatatatatatatatatatatatatatatatcaatgattaaagaaagggtaattaacacctagcaaaccaaaaacaaaaatgtgaggaaacatgaacctgctcttttccctgtggcaccagcctttttaaggcccatcttttttattatgaagctagagccaatgaaaatgctggaagagacagccaaaacaaacccagttacgttgtcagaagacgcccccatttgtcactatcatgtaaatgatatccaaaaaaatatcctttgatgatacgaacaattgcagggccaagatgtccaattcaatcccttgaccctataagccattgattcaacgtacaaatgcattaacaagaaaattaattgaatgaattgtataacatgaaatatgcatatatagacatagaaacatccaaacattagaaggggtatgctatttaccttattgggcaccttacatacaactttatggctagaaaatcatgactcgcacaaaactaaagagaagggttgtctgtgcatgaaaattgaagccttaattgttgatgtcaaaggtgagggaggaagagatcatggaattgggatcgaatggaggcacgagacgcaactgtatgggtgtcacgcatgcgttgcagaaacaattacctcaaattaggcctctccgcaactcacgttttctgagaccttttgtattagtaatagttattacgattttgtgctgggttgtgtgtggcttttttatttattcagagtcagtagcatgtagtaatagtgaatcttataagaatagtatttgttaaagaataatcaatactaatagtcatgtatcttaataataacttaaaaagtatatcatgtttcacaatcacacacacacacacatatatatatatgaagaaattgtttttaactgtgggtcaattgattaaaaatcattcctaataactaaattaatacaaaagtcaattttattgtatatgtaaatatatgatcaaataatgtattctatataaacacacgtgggtaagtatgtgcatgcgcgtgcttatgcgtgtgtatgaattaaacttgtgaataaatattaattaatataatatttagtgttattattataatattaaaatgtaagtatttttttctcatatagtattagttataacagttattaaatttatttgtatataattatttgtaatggcatttaaatatattatacttttattcaatgcagcatgaacttttatttataacaggagtggtggaatttaaatataatatttaactgttatttaaatttattagtataacagttatctatatgtatatatatgtgtgtgtgtgtgtgagtgtgtgtgtgtgatattattcttgttattgtttaaaaaatctaatttatagaaacatatttttgaatgggaatttccttatataatatttattgttgtttttattaaatataaaatataaataacattaataatcttactaaatattgtgtttattaaacatggcatatttattatatttaataaatatattatataattgttccgagaaagactaattaaacatgataagatatgattagataataacgtgatcaagcacgagaacaagggattcacgtgatcaagcacgttagtgcgatgaagttagatagagtataaaaggtccattattaatcttatggttggcctaatgacaacatgaggatatacaactcccaagtctcgggcgttataatggaaaggctgaaaaaaatagaaaaggtagattatacaataattataaaatgtattattatgaattattttaaattttgactaatatatataaatatgcttattttcaataattattattagttttacataatatatttaaaagtagttaaaagaaagaaaacaaatagacttgaaaacaatcattaatgtaatatataatattattaatgaattatacataaaacatactttatagtagcaaaatttaaaatataataaattttacatataaacttattattacaaaatttattatccaaacttatataataaaatctacatcaaacatttttttttatttttttactaaaaaatattttataaaacttattttaaaatagaaaaactcagatgtatattcaaataatgtataaaagttgataaatttatatcattttgatattatcttatgttggtttcatatcataaaaatcaatatgtaactcttatttatgtctggtggtattttaattatgtattttttttaataaagtacattcaatttaaataaatcatatatagggtttaatatctttttggtttctaaacttttcaattttttgcttgtagtccttaatcaaacttttgatcatttctaattcctgaattatttctctattaacatttttgctccttgttatcaagtaatgtgatattcacgtgtaattttttttgtaaactatatgaagaaatggtttgtgcaagcaaaattaaaatggaagggtttagtgtttgcttaagaagtgaattagggaatcagggtttgaagggttcaaatattatggattatctagttatggagcttagggttttgattcatggattcaatgattagtgattttgcttattttagctgattttacttagtgtgagttgttgattttgtgttttaaatatggttcaatggatcactaaattgtgtattgagggttgctgcgtttgcttactacatatcttttttatttatgtttttcaattcttcaaacttttttgctggtggttttatatggccaaaaaaattataatgccttatggaaaaatattccaaaccaacaatgttttatcacatgactattatatcaaactagtaatttacatgaaaagtcacatgattatcacatcatcacataaaaatcgtatttgatggaaaagaactaaaacaatgacaaacataattaaggcactaagatgttttaaaaaatatcaatatagtgaagatgaattttcaaattgctttatcaccttttcattcttaactttctcaaactatccaaaggagtttcatgcacctatcctttttatgtctcctttacctacaagagactttttctatctcaaatgcttgaataaacacacacaacgacttttatcacaactgtgaaaaagtaaaaatgtttcttattatgagaagtaataactataattttttaaaatttataaccatacattagtgttgtaaaaacggttcggatcgtaactcggtggccaaattgggtcgtttccatgtttggaccggaaatggaaccgactcaggttgacctggtaaaatccgacttggtttttggttgaatcggtttgacccgacagagttttttcaatttttccaattactggcccaccagttagaccgctgacccactaacctactgatccactatctcgtctgaatcaatgattggaccagatttcacaactatcccatatatagatgatcaaaataaaatattagattctaatcttataactattttaaaaatatcatgtgcatttttgtttaatcccaaccgttcaaatataatctaatggtttatattatttttgtagttctcattactcataataagaaaacttcttatttgatatttttctatgaataaattcacactagataatataatttaaattataaattagaagaagacttatatgaatacatgaattataatttaaattcccaatcaacaatttaatgtgtaatatagggttaatttacaacatttccccacttataaaaaataattatttatttattgggcaattttgagttgtttacaacttaagaaaggaaggaagagatgagagacaagtgattgatttgattcataatgtaatgtaataggaaaataaaaaaaataaaaaataattattcattgtgtttaaaattttgggttctgaaaatataatgagtcttatttataacatgttgtaaagcatgttccttatacatcttatttcccttattcattcttgagagtttaactttctacactagtcatttttctaatacactcaacatgtacagtgtaataccgattttgtctttcttaaaatccgtaagttgcatattaacacacaccattcgatttcttacggatcgttgatccgtatgagtcatacggattgtcaatccgtcaattcatatgactcttacggattgtcaatccgtatgattcatatggattgtcaatccgtataattcatacggatcatacggattgacaattcatatgattcttacgaattgtcgatttctataagaataaagttgaaaataaaaaaatatgttgaatgtattagaaaaagtgctgatgtaggaagcaggactccatttcccataccatcagacgttagaagccgaagccgaagcccaagcccaacgctccagcaccaaacttagccgtcacaacaacgaacaggtacaatacacctcccattttttctctttcccaatctaccctccatcctccgtcaatccccctaacaatcatttcaatgccctcaaaatccattcacttcaacgccttttctctgtatctctctctttaatcttccaaatcttggaaattattattattgaaagggtccttcccgcactaatttatcgaaaatccccccgaaattaggttttactagtatttatctatcagcgattggtggtaatttttcgaaggtagggtttaatgggtgatcgcggttcgggcgctgcgaagccgatttggatgaagcaggcggaggaggcgaagctgaagagcgaggcggagaaggccgcggcggcgaaggcggctttcgaggccaccttcaaggctttggagaataaacacgacaagggaggagggagcgttgctgaatcggacagcgactccgaggaggagtacgaggacctggcccacaagcccattggccccgtggagcccgccaagtgcaccgctgcggggaccgggatcgctggcggaaccgcgtgcgctccgtcctcgtttgtggtggtgactaaggacgccgatgagaggaaggtttccggcggtggtgcgcaaataaaggtgagggtgactcccgggttgggtgttggagggactgagcaagaggggatggtgaaggatatgggggatggaacatatactgtgacttatgtggtgcctaagagagggaattatatggtcagtgttgagtgtaatgggaggcctatcatggggagcccatttcctgtgtttttcagtgcagcaggtactacatatgctttacggtttttgcttttttttttttttttttttttttaatttagtatatgcatttgcctcaaatgtggttgttttgagttgtttttggtttggttagttagcagtttcacttggttgccttttatatgtataataataagttggtttgactaggatgtaattatgagtagtgataaaacaaacaataacaaaagccttatcccaccaagtgagattggctacatggatcaatgacaccatggttacctgtagtgagtgatctgtgtttagtatatctaatatcaacgagttttgtgttggctgccaaaggtttaacataaccctctcccattacattggcttgagattggctatgcataggcggagtgttgtgttgataaccttgtcgctgtctatatgcgtgtattttggtttgaatgatcttcgtggtggtcaatttccaatgctttgatttgttttgtaggtaatagtactggagggccgctgggtttagctcctgcatcttcatttccaaatcttgttaatcaaactatgcccaacatgccgaattactctgggtcagtttcaggggcattccctggattgttgggaatgattccaggggttgttgctggagcttctggcggtgctattttgcctggaattggggcctcacttggggaagtttgtcgtgattaccttaatgggcgttgtgcaaaagttgattgcaagttgaatcacccacctcataatttgttaatgactgccttggctgcgacaacctcaatgggaacacttagccaagctcctatggcaccttctgctgctgcaatggctgcagctcaggcaatagttgctgctcaagcccttcaagcacatgcagctcaggtgcaagctcagtctgcaaaagattccattggtatgctattatcttaattttgtttttgttttagtggtacgtttatcatttcacaattctaaatttctaatatgatgaaagctctctccttaattttgcactatatttgactgtgatgttatttttgttgttgtgttttactgtttcctagttttttcttctaattgtatttgctaccacaataggttcacctgaaaaggctagtaaggatgatgcagtgaagaaaacccttcaagttagcaatcttagccctcttctcactgtggaacagctaaaacaactctttggattctgtggcactgttgttgaatgtgcaatcactgattcaaagcattttgcctatatagaatactcaaaggctgaagaggcaactgctgctctggcattaaacaacatagatgttggggggcgccctttaaatgttgaaatggcaaaatcacttccacagaaaccatctgttgagaattcttcacttgcttcatcatctcttcctctgatgatgcagcaagctgttgcgatgcaacagatgcaattccagcaagcactgcttatgcaacaatctatggctgcacagcaggctgctacccgggctgcaaccatgaaatctgccacggagttagcagcagcccgagctgcagaaataagtaagaaattgaatcctgatggagttggaagtgaagagaaagagacaaagcaaaagtccaggtttgattactgttgtcaattgtttagaggataatatatgcttattgtcctgattttatttcaaattttttattgcttcaaccactttgatttttgttctgggtagttctggtatgtcctaaataggaagtaggagacatgaactcatataatgtttgaacaaatggtgcgaaaaatagagagaaaactgagaagtgtttctgtatttcttattatgttcgggataatggaagatacaatacttttatgttgttacagaacagttgtaattaggtcaaacttgcaactgatgtgacactctaccaactatcctaagtgaaaccagccagctggtcctgacagacctatcagctggcagccacctgaacaatctaagtttggcccctgtgcaggtccacttctacaatgcgcaggcccaatattatataggattagatatttattcaaacacacttgaaatatcaaatgtgtgtatcaacaaatttatagctacacattagttaatgaggtcttgatagaaaataaggtttttgataaaaaaaaaagtgcatgttctttttatgcaccatcatcactagcataaaacttttccaattactgaattaaataagaattgagtttctctgctttaataagatgtgtcataaatctgaatgatatatggaatgttaatgctaataaagataaaactatgtaccccattgcccagaggctccttgctatgtgaaggtaaggaggaaggatattgtacgtagctttacccttacatatgtaaagaggctattttcggatttgaacccatgaccaacaagtcacctagacagtagacacaacattaccgttgtgccaaggtttaccctcttaatgctagtaaagatgataaagtaaactgtgatatgtgcaagaatggcatgctttcaatcaacatattttcttagcggcttgcatggaattccagattatttgcccaggggcttggtatggaaaagcaacttgtcttagatcattttagtttttaaatttgcatggcagtaacagactggatagttgtggttcatgggttgaggagggggttgttggactgtggttatttagccccctctgtgcataaggaatagtaggtacattgtagttgaggaacctccccacttttgctttgcaaagttgctgagttatggggacttgtgccctcctgcagtattggaggtcatttgggtgacgcagcaataatagagtatgaattgacatacttgggagaattccttgttgattggtctgctttccttgtttgtgcagatcctttagaaagggagattttcattagagaagttataattgtatatgaatttcaattgatgccgttgtcatgacttaactgaatcaacctgctgttctggattattataggtttcaacatagaaagtttgaaatatttgaatcatatgaagtttctatatttctagctagatgtggtagggctatgtatgtgcatgtagatgctaaaaaaggtaagaagaattgggctgaataaattatttgtatttagaattaactggtgtctaacatggaagaaatatattgtgggtggcctggcaattggcaagtctattgtttatcatggattcgtggttattttgaattgggaaaaatcttgttgtaatgttttttttttttaattttttctaccactcattatcattttctgcttttctgtacaaagttctctgtctaatctaaaatttaatttcctttcgcagatcgccctctcctcctcgtggaagatttcgatcaaagtcaagatctcctatcagttatcggagaaggaggaggtctcgctcttattcacctgctcatcattctaaggatcatcgctctaggtcaccattgaggtcccatcattactcaagctatgatagggaaaggcggtcctatagagatattagggaacatagtgatagatacagaagacgagattcagatagatcacttgatcatcgttcatctgcttcaagaagaaacagaagtaggagtgtaagtccttatacaaggaaatcatctgtttctccaaaacatcatagagaaacttcacctcatagaggaaggaaacagtcacgtgctgattctggctctccaaatcgtcacagaggaagtaggtcttctccaaagattgatgacaaaaaactaagaaacagaaggcgctcaaggtcaagatcttcagatgataggcttcactctagcaaaaatgaaaaagtcttgcatggaaagtctaaacacagagagagaaggcgatccaagtcattatctgtggatgagaagcctcacagaaggagccggtcatcccaaagaaaagtggatgaaagtagatccaggcacaaaaaatcgaggtcaaaatctgtggatgataggcatgattctcctgagagattggatgaaaacagaaatagaagatcgaggcatagtgataaaaggcactccagatcaagatctacagaaaatagggatcaaactaatgtcagagaggatgaaagtaaaaatgaaaagtcaaaacatcgtgatattaaaaggtgcaggtcaaaatctgttgaagggaagcgtcgttctaaagataaatcaggggaaaatagagataagaaatcaaagcatcgtgatagaaggcgttcaaggtcaatatcattagaagataagcatgacaaaggaggcacttcacccaatttaaacttggataagagaaattttgaactgacaaagtcccctgaaggcaagaatcactccagtgataaatatcgaaatagaggtgaaaaatcagagcctcaaaagaaaaccccatctaaatcaaaatcagaacaatttgatgggagtgggcccttacgaggaaattacaaggaggatgattcaaaaggaaaatcaccatctgattctggatctgttgaagaaaagcatcatttgaatgatggagaaaatgctaccagtgaagaaaattctaaactctttggagatgtgtttcaggaaccaattataaatgcaaaggactcagcaatcctgaatgataatgggacactgacttcagtgaatggtaactacaaatcagaagggtcaagtgaaaatgcaggagctgatgataacccaggtatgggaagtcctattctcaatcattgttgttaattatgttttagttggatgttacaaatctgagaatcctctttgatgcaggatggatatcagtggaaaaagtgggaagtggaaaatattaagcaaacatggcttggtaatgactaacttgaatatagaaaaaaagagtatccacttgtattatatgattattaatgcttggttactttctgtgcttacaggagtggtggttctaaattatatcaaagaacatagctatgagtgtagatttctgttattcaatcttgaatcggacgtggtgtcactcaaggctactaccatttcttgtcaccatagtgtagatttatttcaaaagcattgcaccatggttttttgtggttgaagatttctgcacctgtcaatgattatgggataaagagcatattctaattcaggattctcatttaggtttcctgacaagttctttccaaggaatatactgtttcttcttaggaggaccgcaattctcagaggatgatgcctccactatttgattggtccccagaatattctctgttctcttatgaacatcttccattgtttatttcttttgcaggttgggttggtaaagatcaggtgtagaatcccacagctgttggtgtggtttaagttttcaagaggagtcctgcttttcgcatgatcaaccgtgcagcgcttatatcatgcttcttttactgcttgattgatgtatgttggaatgttattttaagtatactattatttttattgaaggtaatttttgctatgtttcggtcttgatatttatttttaagtatattatttcccaattaacttgggttaaaggtgttgttgatggtgtctgaatattattggtttctagttcttcaaaaatgatagttcagagggagaaaccctcttagccagtgttcgattttatgcatctaaaacttattggaccttagatagcaataatatgttaaactgaactttcggtgactatttaagtttatctcctcattggtctgtcatatctagattctatagttgatgtggccaatttttgtagtatgatcttgtttagttgaaagcatcattatttgatgtggccacccataggctccgtttcgtttactcatgttttgtgatatggtgggcatgttatatccaaaaaatatgcaggttattctcattgaaatctgttggagctttgagatacagttatgctgggttgattttctcttgtgtaatggaaggtatgcggttagattctgatgctctatggtttagagcatatttgtttttcttttagtaagtgttgagagcaatatggtaggctgcttagctttgtattatgtgcgaatgcatttgctctaagtactgttttccaatatttttaccatcatctggtgtcttatattgtcctgcactccccccccccccccccccaaattttcattttgttttttttttgcttttttttcttttttcttttttcctcccaacaaattgtcatggttaggtaaagcttctatataaaggtcaactgaacctggatgttgctgcaatgagtttcatcatgttgcatttgagcaactggctgagttacagtttttacttaagtaaatgctgtaatgcaaatgatttcaacaggtaattctccgtgaaactatcgggtggtggttctatttgtgtaggatcttcaattttattttgtctgtcttgtcccatgctttacgtagttctgtatgttgtcctgctcacattgatgtttttgcatcacattctttacaattatttgcatatcgagccattttcagtgtcatcgtaatgattgagttgagtttttgttgtgttgattttatatgttgtcacaacttaaattgtgggtttgaaaaatgagcttgttgctgagaggtgctaaagaaattatgtttttttttctcctgttggtgggtcacaactaagtttatccccttgttttatgctctctttttttctgtccccagccccgttttcttttttccccttctgctcccatctccccttttttttttggttaggttaagcattggatatgatgatcttatgagcagctgcaaattctcttcaccagatgattgtgtgaagtttgttcttggaagttctgttggtgttttagtttccttttttttgttgtctcttcaccacctggtctagtcacactgatgttatgccttctccggttggcgcttagggcttttaccacagtgtttgttcatagttctgcactgtttaataaaagaaatgggtaatactattctaggttattgttgacctcttaacatgttgatgcgtgcccttcaacatatacaaataactagtggctaactgagggggaagtattgagcgttgatgacttaggctcttgaggaatatttgattaaatgttggtcccctttttcctcgaaaataatcctaatttaagctgtatgaccaacctactcagttgtagctaatcatcatcatcgagtgaaatcacgtcgttctatgtatctcttgctgcacaaaaccaagttaaaattggtgaaactaatgttttgattttgaagtggaagtttattaatggaaattccaaagtgcgtcaaatctaatataaatattccaacacttaaattgaagtttgtttttcttttttctacatactatgttatctggttattggaacctcgctttagctatgattcttttaaatatattattttttattgattgatatttataagaaatgacaatttgcgagtcttatatcatttaatgatttttttccttattaaagatagagtattttgaaagtgtcagtgttttttagtacccctctttcataatagactcaatttacatttatcaagtgcatgtgaggatgattgttaatacagaaatacaattactacaagcgcaatactcctttcgtttcgtaatatttgttgttctaggtatttacactaggtattacataaattaaaaaataataataaatatataaaagagaataataattttataaaattaattcatttataaattttatgtttccttgttaaaatgataattattttaagattattttttctttacctataattaatataggatggagttttatatatatatatattgcatgtacacgtcatcgtcgttggatagaaatggtgtcctgatcaaatttagtctaccataccagctaagcaagaaaaaacagactatcaagcgtacaactgcttattattttgtttcttggtcccgttttgtcgtcaagttaattggtgtactaatctaagcaagtttttgtattcttttttcagcagcagcctttctaagtaatgaaaacaattgatgacatatgcataatgatggccatgacgaatgtctgtaaaactgatttttaagttaaaaattatgtttgatgtttttatttcaaaactatgtcagtaataaagttcagtgtaaattttgttattgactgtgaaacttacttaaaatcgatttaacttgatcaatttttatataaaatcaattccttaacgtaatgtcaaacatgtaaatacttacgtgctagctagtatgtcaatgtggatttggataatctaatatgaattcaaaaatgagtgacaaaagaaaaaagacgaaacttatgaagttaagttgcacatgagaagcaacactatataatttatcaatttttactttattcttctaactttttgattggcaaatcgttaattaaagtttaataaccaattaattttgacatttcactcaatggtaatttaatcactatattttaatatagtctgaaattgaatttaaaaatatttttaattaaaatgtgagttttgtcctaattcaatcataaataatacctcattggatgaaagttgttttcaatttatatattctatttttaccttatttcttgtcgatatgaaacttagatttttttaatacattccttcaaatccaatacttttagaattggtatgtgaataatatgatgaatgacctattttacaaacttttaatataactcaatagttataataagttactacttttttttagtatctcttttagtatatccaattagaataatatcaaattaagctctttaaaataattttgttttaagagtaatacaatattttgtttcaattaattttcttttaaaattctcaagtattggacttcaaataaaaaagttcaaagttatttcatatttttttttcaaataagttgtgaataataaaaaataaattaacttgatatgtatacaaaataatcaaaacttaaaagaattacagtatatttttatatgaattatcaaaatcctctctctatatagattataacaattatcttaagcgttgacattttaggaatttttttttccatgagaaccatttgactgtttttcttatcaattggagccattttaggatttttattattattatcctcttgtctctttcaatctattttttatttctaaattgaattttaatatttttcttattccacaatatgaattgttcattataaattttaaatataatcaatatatttgaaaatatttatttattgtaaaacttagttacataaaatagatatttatcctttgtattgcataagcgaaaataatagttaatcattactcaaatatgtgattttatcatcaaaattttatgaatcattactattttatgaaatctaatcattatattcatttcaaatttattatttttaattcaaaataaatataaactatttttatttactttttaaataaatattaactaacaaagcattagtttaagtggtaataaattcaattctgttaagtaatattttccgtttgagtcttataaaaaagacatccactgatcaatcataatgcttaacaaaaaataattattaacaaaatcagtaaatactctttaatccttaaaaataatataataaaaataaatattaaaatttctgaaatgatccacaactatatttatgaatatacagatttttaaattacataactttttttataatcaccataataaaattgtataatcatactaagaaattaactacaaacaattactccaaaggcggcggccatattagttaacggtgttgaatgcttacatgaaaatgtccgacagaaagataaaccaaaagatagagataaatatttttattgcaatatcaagttttgttaaagactttgaagtctcaaattgaaattccatatataattaagcaccctggaaagcataaaaacacgtgtattggacaaggtaattgattttacacttaattatatttttagtccttcaaactttaaaaatttctttttaatccatctccttaaatacattttttttaaattctgatagaaggactatataaaaaaaaaatattgtattatacctctttgtaataattttttacaatagtcttttttacaaagaaaaaaaatattaaaaaatcataaaaaactattgttaaaaaaatcttacaaaaggtataatacaaaaacaaaattttaatgatacaactattcctatggaagagacaaacatctatttttttcctttcctcgtgtaaaaaaaaaaaaccgaagaaataagatttgataatacgattttaaataaaccggatgttagagattcaattaatttttttcatgttatgattggtgattatagatatataacttagtgccttgttttttaactcataataataataatggcgaaggtgtttagttgttatgttctgtattgtttgtcaagatgcaatttgtgtagttttgatttttttttccaaatgaagtatttgatcttttatctcatatttttagttaaatttaattatttatcttctaaaaagtttaatttaatattttttttgttcagtttagtctttaattcttaaaaaattattttggtcatttcttttaatttagttctttgttccatttaagattgttgtctttagtaatttaataataaactttatgtgctaaaaatgaagtggagggaaagaaaagaaaattgaattaaaaagtttatttttaaatgattaacaacttcaatattaaataaactgaaaaataaagaatataaagaaccaaataagttttttaaaagataaaggataaaattgaaccaaaaaattaaataaatcatttacccttaactttcagcatactagtgaacagtgatctagatttgagaagtatattaagcataaggatcaatcataattattaaagcattataaaaccataattattaaaaatacaagtaagcttaaacatgttaataaagtgggccaaatggtatttatcaactgttaattttttatataaaaaaaagaacaggtatttgtcaacagtaagaagtatggtctacatgtcaaaagaaaaaaaaattatatatagaagattaggtataacaacttttaagaataataaagaatgttactgatagaaatggtttttctataattattaaaaaacattttttaatagttataaaaataagtggacttaattattatttttaaagaggaccatttttggaccaatttaaggaggacttaaagatgttaataatgtgggcaaatgatatttgtcaactatttgaaatattgtctacatgtcaaaaataaaattacacgttaaagattagaagataacaactttttttttttacaagagaatataacaattttatgactaacaaaaaatgttacttatagaaatggtttcttcccttcctacatataagctaattatagagattataaaattgatttgataattaaaggaaaaaggaggagaaaagagactatgaatttaaatcttccactaatataaactaacaaataatatttctcaataaaaaattaatctttcctgaaggtagataaagacacaatcttatttgaatgtcttaattctaaaaaatgagaataatataagatacaaatatatagttattatgtgtggtgcaaataagtcttgtttgcaccactatctatttgtattttggtgtcattgaaaaaatttcaaaatattgaatttgacttgtgaaactaaaataaaaaagatacacattaaaaaacagaatgtttttgtaaaagttcaaaataagattatattttatcaaacaaaaattaattatataactcccctccccctgaagttatcttccaaagcttatcctcataggaaaagttcaaaccccaaaaatacaattattgaaagagattattaattgcaatagtgtgttaatcattagttgtaatattgtatttacatttagtgtttttattgtatttttggtacttttttaattagatttaaaatctcaccttgataatttatataataaaaaaatgacattaatagtcaacataattttgtttgatacatgatattaatatattcattaattttaataatgattaatttttattgagaaatctaattgataatctttgttaggattttctcttctaattatattttttctacccacaaatcaaaatcttgtttaaggatattaaactcaataataaattctactcaaatcaataagatattaatagtcaacatatatcaaagagaatctttaaacctaaatagaaataataccaaaacagttcacatctaaagtcttatccttaggtatgattaatattaatataaatatttcaaaataaaatagaatattccataaaatttttaaaaaggaattgtacttttattcaaaagtttattatatatattttttctaaagttatcgtcgcaagcatggggaattaagtttaaattaaaaaaatgacctaaatcaattattgatagctttgatatcaaagtacatcgctttaatagttcaaataaaaaatctttttgacatatttggtttaaattatattgaagttctgaaaagaattcttacgaatgcttaaataaatcttgcaaataaaaattgaaactagggacacataaggtatgacttattttaaattagagaagtgtgacaaaatattgtttgaatgtaaatgttaaaggtgcaattgtagataacaaataaaaggcgtaattaaatttgtttgtttttagattatttctatttcttgagagaacttaaaatatttatttctttaacttttgttttttacaaaatatgtacttatgattgattgttttaacttttttctcacatatatcatcttttaaaggtgatcatgtttaaaatatgatttggaaaaatatgattgggtattaaatatggatacatcttttagtaaaaatttgaatctttatcggcgatgctgagagagtctaactcccattgtttgtttgtctctttttttagtttttattaaaaatatttcatatataaattatgtacttaatattttggtactaatatttttcttgagcattatatatatatatatatatatatatatatatatatatatatatatcacgatgagttgtcaactatgtcattaaccatttagcatacataaaacggtatattctataatttatatttaataaacttattctattgtaagtcaataatggacgcattgctatttaagaacaataaaatctcccattccatccacaaacaactaaagatttgttttgtttgacaccaaaaaaaaaaataaaaactaaaggttttttttttaggcgtaaaatttgttgctatatacgatttttaaataaactggatgtcaggcattcaatttattttttcatgttatgatcaatgattatagatatataattcagtgcctttttttatgtctaggcatgatattatattttcagaaattacattcttaaaaatattataactaaaaagttatttctagatatattaaaatgagggaaaataagatagaagttaaaaaggtatgttaaaaaattttcatatgatataggattctcacacattcacataaaaaatgtaataattttttataatttatatcaatcataaaatgttatatctttaaattcacatttattataaaaaaaagtgtatttatcgaaatttaaaattgattattgtcaggatcaatatagttaagataggtttcatgatctctcaagttggattacaagtatcctttattaagagaatatgagagagaacttgtaaaacaaagaactttgacattcaattaagtgtgtgagtgacttgagaatgaatcaagaaggagatataaaacttaatatttatagcgttggatgaaaacttcatatatttaattataagagatatcacaatgatataaccatctttgtagataattcattgctaatagataagtagatacctaataaagaaatagtagcattattattagaattcaaatatatatatatatatatattatcagtttattagactaatagttcatctattaagagatttacgtctatactcttttagtaggagaactgaataaaagggttaatatatatatatatatatatatatatttcaatatcacatcacttattatgttaatttgtgaatttcgaacaatacatgaattaattttatatgacttaaaacaaatatatttatagtgaaaatataatatataaattttttaaaaattaatttttaaaaatcataagaaacaggagaaattgacattttcatatttattattgtgagaaatcaacttttaatccctcgaatacgcttataaaaaataacggtgaaggtttttagttacgtatgttctttattgtttgtaaggatgcaatttgggagattttaaaccgtgtgcaacatgttagtgaatagtgatgtagatttgagaagtatatttaagcacaaggttcaatgactcctaaaaaaaaggataatattcaataataactattaaaaaatacaagttagcttaaacatgttaataaagtgggccaaatggtatttgtcaactgtctgaagtataatctacacgtcaaaatagaattacatatagaaaattagttataacaacttttaagaataataaaagatgttacttatagaactggttttttctatgattattaaaacaacaattttttaataattataagaaaaaaagtgggcttaaacatgttaataaagtttgcaatggtatttgtcaactgtttgaaacagagtctacatgtctaaataaattaaacatagaagttaggtaagataacaactttccacaacaataaaagatgttacttacataaatgttttcccccatcctacatagagctttcataaaagctaatcttactagagcttgagcaaggcagtctcatttgaatgttgtaaatctaaaatatatagggctaatatagaaggaaaaaaaatactaatgtaggaacactatctatttgtgttttatttatctatatttttatttatatctaatgttaacaatcttcaattacaattactacatgatattttatttatttatttaatttttaatttatcctgaaggttacatgctaaaaaagattatattaaaattaacagtggatcaattatttatgactttggtgtcaatgaaaaaaaattcaaaatattaaatttgacatgtgaaacgtaaataaataaatatacgtatttaaaataaaaaatatttcataaaagttaaaattggattatattttatcgaaaaattgatcatgtaaggtttccccctctaacgttatcttccatagcatatcctcataggaaaactcttaaagttcaaacctcccaaaaaggacaattatcgaaagagtttattaattgcaatagtgtgtgaatgattaactatgacaatgcatttaagaataggacaatatttatatgtaatactttttaaaatgtatttttgtttttattatttattcagaattgaaatttcaccttaataattcacttccttctttcgttccttttttatttgttaaatttttaaagattttttttttcatttttatatgtagtttgcagagttcaaaattatattaattatacgtacttttatgagtttatcaattatatccttaattgttttttatctttaattaatttacacatatatttattgtggagtaaaaagataaaagagtgaaatagaaaatttaacaactattttatcataatcaaaaaaaattattttatttattggtttctacaaaaacaatcgtaaacgacggataaaaagaaatggacgtaatatataataaagatttatatgaagagtcaacataggttatcaaagattaatttcaaattaaaataaaaataatacaaaaaaccaaattgaagcaccacatctaagttttatctttaactgaataaaaaaaatctgttttatcctttcgaatatactataattaatattaagtattaacatgcatattttaaaataaaatataatatttcataaagaattaaaaaaggtttatacttttattaaaaatctgattatatttttttttcctaaaattatcgttgcaagcatatcctgagggaaaatttaaagtttaaatccaaaaatgataagtattaaatgtataagaatttaaatcttaatttgctagactgactttttacgttacctaaatcaaatcccattattttatttgcatttttttttcgtttttaaaatgtagaattcacgtataaactatgcactttttcatttcgttgatgtacgtataacttatgcacttaaaacaatatatgatactaatatttttattgagcatgatatcacagtcacttgtcaactatgttattaactatttagcgaatctctaaaacaaatgtatctttagtaaacttattgtattgtttttttagaggagtaaacttattgtattataaatcaattattgttgcatttttatttgagaacaattaaatcccccttaaccaacaactaaagattttgggaaatcttttcatatttaatatatgataatatttttaataggtaataattactagaatatttaatttgtacatttaaattacatgacaattatttaatttcttttttttaatgttttttcttacttaaaaaattaggaatttaacttctttatgaggtatggaagttattgaaaaaattagaacactgaatttaatgtgcattatatgctcaccatgccaatgtacgctaagcgcatgtttaggatttagtgcatggtcacttaagacaattgtactttggatgtgtgctcagcgcacacatgcatacttagcgcaaagtcatttttgaaaaacatgattatgcaacgttttgaagattataaaaatgtgacaatgtgcttttaaagggagttagtcagcaagggcacaaaatagagcaaaagagtcacttgggagctcttcttccatttcctttgtttcatcttttgttttttagtctctcataatgattatgagatactaaattatccattgttggggtttgaataccaaatactctttgatgtagtgaattttactatccatttaatgttatttcaatattattgctttctatttaagtttattgtcttatttatgatttgatcacccattcacatgtatattatacgattttaatcattgaaaaatatttttaccctaagaacttaaaggagcttctaggtaattcatgtctataaataaaatgatgttatttacccttatttatgcatatttattcttaaagcaaattacttagtttaattcttaagagattaggagtgaaattatatgatttagactttttaacgtgaagaatcatgattagagtaatttagttaatgaaaataatagttggaatactttaaatgatgaatatatatatatatatatatattagatataaataaaaaattatatcatttctttttttactggaaaaaatatattaattttaaatatcagataatacagtaatagtaatgaaataggaataataaattgttgggttacattgtttctctgatttctttagaatggataggtcttctatatacatatgaaccttttttttcttttcgtatataacaaaataataatataaaagcctttatatatcaacaaattaggttttagaaaagggactaataattttctacaatgtggtaaaaggattgccttcgaaacacatggtaaaataaatacataagtcttacacatttattattcagggatgatgatttaaacacgctgtaaaataatgtctatgattttggacacttcacaattttacaccagtaaactccattggcacataagttttctcagtctccctcttcctattattaatcatatgtattatttgtcatatttatatttctttggtgtaaaatatatgtgatagatgtttaagaattatttttgtaaaaacaacttaaaaaaaaatctagatgtgttaaaaatcatatatgcataaatcggaataataattcctctttcattcattccctccattctcttctatattttccctcaatatgaggttcttatataagagagagaaattcaacaaaatgctaataatacgggataataacaaactgaacaaactataacaacctaacaaattctaaaaataatttgaaatttaaatatacaattcaacactcccccctcaagttggtgcatgaatatcggtcatgcccaacttgccaattgcttctttaaacactcttctaggaatgactttgatcagcaataagttcaagaggtgcttcagaatagtccacgtgctttggttatgtgaggtagaaagaaaattgaaatacgagaagagattccacatgcttcggttatgtgaggtagaaagaaaattgaaatacgagaagagattcggaactgttcatgtcaataaacttcagggatggtctatgaagattcagaacaatgcaactgacttcacatcaatgaccttcaaatagaatacgtgcaggaagacttcaatactgaggtacgagaatgattcaaaacggatttatgttatgccgtttgtgttgttttggggaagaaattaagatacggtaaggattcaagtcagaaccaaagatgtgaaggttatgtgagacaaagattgagttcatgatgataataatcataatttgtagaggaatcggagaaagtgaaggttaaggaggaggtagatggttgggtatttcagaatcagaatcggccatcaaagaagggagttaggaatttgagagaaataaaagtggaatacgagaagataaaaagaaatgtacgtttgggaatgtgaagaagaatacatttggatatggaatggggaagaaaaagactctagtggcggaagataattttgttcatggaggataacctgactctcattcatggaggaaatcatgactgtcgttcatggagggaaccatggctctgataccatgttaaaaatcatatatgcataaatcggaataataattcctctttcattcattccctccattctcttctatattttccctcaatatgaggttcttatataagagagagaaattcaacaaaatgctaataatagggaataataacaaactgaacaaactataacaacctaacaaattctaaaaataatttgaaatttaaatatacaattcaacaagatgtgtataacccacccaatgaacaaaggccacaccttggcctcccagacgtttacttaaggctaaaacgacagctaaccacaaagtacaaaccaatctcgtaaaacttattatttttttggtgaaatccaatcacgcaaaaataaataaaaaacgaaatgagaaccatataaaatcgataagtcataaagagtaataccaaaacacacgcaaagcaaatgaagtagtaagagcgagagtgtgatagagagaagagaagaagaaagggtgagagataatgcggtgttatggtttaatcgtaccgggaagcgaccagcgcttctgcgtccccaccgtatctccagtgttcttgaggcccaacaaacccattatcacgacccgaatcgcgtttccaaaggcgaccctgaataagaacgagggtttcgtggtggagctgagcttctacgagcttctgggcatacccgaatcgggttcggtaacggagatcaagaacgcctacaagcaactcgcccgaaagtaccacccggacgtgtcaccaccgggtcgggtcgaagagtacacgaagaggtttattcaggtgcaggaggcctacgaaaccttatctgatccttcccgaagagctatgtacgataaggacatggccaggggcatcaacttcgccttcaacgctcgtcgacgctataattaccacgatcaggttcgccagccaacttagggctttttaattattccattcattttatttgaatcacatgattcgccatttcaggagatataaggttggttgggtcatgggtggttaagaaaaaagggaagctgctaacaaactaaccattatcatttgtcgccatttgaattgtatgatttggcaagtgtaggatgaattgcaaattgctttgaattgttcgatgtatgatatgattcaataatttgttgtgttttctaattttttgggtggcttttcttttaacagtcctcgttaaagatattgaaaatttaaataagtttaaattgtgaaataaaaaggaatagggaattaggtatagtgctgcttagtgaatgttgtttggttgttcttttactttgattccatttgcacagtctctcgctctgtgcatgctatttggttgttctgttctgttttttttttttttttttctcttaattctgagatgacaaagggtttgcacacttacactaacccacccaatccatgtgcccttatttttgtttttgttttaacttacgacatattacatatggcttataatgtttcgtgaaacttatggataatatgtatttttttttcaattcctagtttaaaattatacattgagctctatacatcgtttatctgatatactagggctgtttttcactttgtgtctaaacttatgatttgatgtgagttaggattcacaattgaaaaattagcttggtgattcaaaatttgatttgaatttaatctaatctgaaatattgtcttactactgatttgttcacctatctcagtcagcaaacaaagcaattgactgtaactttgacctggaatgggaattgcttcatcatgcacgtttgagttctgatattttatatttctgggtgctttttataagttagtaataggaacttgattctttctctgttctatgttttttgttttccaaaaattacagttgtagcggtcaccttgcttctattggaattctttttcatgatggtatcacagaatcctcctgctgtttgtgaacttatattaatatttaatgtgtctattacagaatttgacttctgctctgcacctatacataattgatatttttataatttatgaggactattctggcttttgttctttttccatttttttccttttcgaatatgtcgacttgaatcccagcctctccgccacaaaatctgaacaagtgtgttgtagttgcctcttcagcacatgaaaatctgtttacaagttaaatttctttttcatgatggtataacagattcttcctgctgtgagcttgtgttattttatgcaatatctattaacttctgcactgtacctacacccaatcattctattttcataaattatgagggctttcggcagatacttccttatgacgtttcctggtaggaatacattgtttctggatttctattacggcttttgttctttttccaaaaaaaatttaaatctttttgaatatgtcaacttcaatcccagccaccaccataaaaaattaaaaactgaataagtgtgttgttgctgtaacatgtataaatggctcttcaacgtattaaaagtctgtgcaagctaacagtgtgaaaggatataaatattagtattattaacaataacaataataatgatgatgaaacgtgtctgcgaatgagattgagtgtgatcttaattatttctttattcatatactactgttcggaaatttctttttatcgtggtaatgagtaagtgggaattcataaatcatgcatcctaaagagatagggatttcttaatttactgtatttgcttgttcagttgtctaattcactttttttccccttctaattttaaattgaagaaaagcgggtaaaggtgtttggctagaacactaattggtttgctcactgattctaagctgttggttttgaatcaggtggttgaacaaaaaagtgaatggaaagctaggtggaaatctcaactgtcagagctgaagagaagaagtaacagcaaggatgttggagggaatatgtcatgggcagcacgaatgcgccagcagaaggatgaattgtcaaatgaatcatgaccaggattttccttagttctctatatttaatgtaactagttgtatatatagacaatagataatgtgtacatcttcgtactcgagatcaaatcagatataaagttgatgttgagaaaacgtgcccttggcccattgctctactcacagttttaagcgtgctaactaatagtcggctgaattaacgtctctaggccattttagtgtgttttggttagcatttgcaaaattggttttagataaaatggcttttgaagttaatggatttatatttagatcattagatgattttattctaaaagcaagttagtaataaaatttaggataaattttttatttaatgcaaaaattatttataattactttaactcaattgattagattaagaattaacttcttaatggaaaattaaatatgtgaatattaattgaaaattatgttcgttggtatttcaattgtaattttggatattctaaggggaattcaaatagtgtttatataataaagtgagatttgagtctagtccataaaatcatggtaactttataaataagttgaagctagtacttaactatttatagcttcactttagattttttaatcaattatgctaaaagtgattttaaactagacacactattagtgtaactagcagctagacctgtgtattgcaaaaaaaattctaagaaaaaaaactaaagaggaagggagaataaaaaagagtaaaataaaataaaaacttaaaaaattgttcttgaaaaactgttcaactgacatgtagcgatgtcttgacaatttttttaatactttatttatggattgttctgtgtggttgttattttggctgtgagaagattttggggtgcctactgatgtgtaaggtgggagggagaaaaatagtttggacctaggttgccagcaagtgggattaggaactttggttttcgtttatgcatttaaatggacgagtatcaagggtcaaatatgattgaattttctttttgatccggcaaaattgatcgaattaaactccacaaattacacaatttggaaggtggaaaaaatttctgttttggttaccaacaaatttgtttcggctgagaagatttttgggttgcctatttatgtgtaaggtggaaaaaatttctgttttggttaccaaccagtagctttaggaagtttggtttaatatcaagggtcaaatatgatcgaattaatctccacaaattatacaacttgaaagccccttatgaaacgtgtcatatggtagttatttgggcggtgagaagattttctgggtgcctatttatgtgtaaggtgggagagagaaatataatttcggactttgtttttttttttttttttttttttttttttttttttccggaatgttttggactttggtcattaggaactttcgtttgtcaagggtcaaatatgattgaattaaactccacaaattatacaatttgaaagcacctcatgaaacgtgttatattaagaaaaaatgtgtatgactttaggggtgatgttattcgccaattgattgttagttttaacatttctcgaaaaattaggatctattttatatttaaaatatacagtaatggtaattaaaaataaataaatttgtgtatccgattgtgagttgttgaaacaataattttttttaataatgtgaaaactctaaatatatctatattgaaattaatttctgctatcaattttttaataagagaaactctaaagaacaacatctttttctacttttcaagtctaaaaattaaacttgaatttctactttgatctagtacactctgatttcatgtaaatgtttcaatttataatattaaatatatatggaatttataatattaaatatatatggatttgagacttttaaaaagagagttttatttaaaataatttcgtatctctatttttatatttgaaaataaaaaacatctcatatcttttttatgctaagaagtttcctaatataagaaaaataattatcaaataatcatgattaattacgataacttgtcacatgatctaatcttgatatgtagcaataaaaatttattcttatttatagacaactaccacattttatataataataccctttatttatattaattatattcttggtactaatgaagaatataataatattctactaaaatatttatttgattaaattaaattctttaatttaattatgaaataatttttttttgcaaaaattggaacactcgtttgtgtgtgatctagtaggttcaacactagaccgatagtaaattaatcacaattaatttactaatcaagataggcgtctaacaacacttcttaaggtccggataacatgaagtaacttttttttttaccttcaagaaccaataggagaataacgtaataattttttccatcatttacagctcaaagttaactctaaagtatattattactatcaaattctaataagttaacatattatatttaatcaatggatgacttaagaaactcttttctcctttcatttaattgttctagtcaaggtcttaattttattatagaactcaaactcattacctagagttgatgattttcttcttaattaatcattaattctacaagtatttaatcatatccaatattcatttaactagtatcataaggcattaggtgtccaaaattaaaatataacaaataatttattaattactatgataatctcaaattaaagaaaattattatatttcttcttaagaacttcctattggcatgtcaaagtaatattaattattaggaattctcaattgagtcagttaaataatgatattcacatgtaaattatcttctatatatgtaatttaataaatgagattcattaatttttattcaataaataccatcacatatatattgatctatctgaattattaatgtcctatttagaataatcctactatcaagaacaatttagattaaaattataaatgaattttttctcattatcatattctgtatcatgataataaatctttaactttaatcaaagatttatcaaattaataatttaataaaaataattataataataaaataaaaaataattctttacaaaaattaataatataataaattggatgttggatatatacacacatttaccccaacagtgataaatgaaaaaaagtattggtttgattaattatgcagtggttggaagtaggaatcaaaaggaaactggccgaaattggccaaattgaatgagcaaaataacatacagaaaatgaagcattatgattcggaagctaatggatatgaatacgaataaggtaatatgcatctgagcatatttcaagatgttgtgaataaattgatgcataaaagttacatcaggtgatgagttgtgagcattgcggttgcttggtttagtgtctgacacgtgtaagttttggtagtaaatcgtgacgttgattaaatattggttaacattatacatgttttactattttgactgataactaatttatgtcagaaaattttattaattatctttaatgtggtttttttttaattatatatatattttttgtttataaaatttaaatttgaaatcttacatataaaaaaaattgaatctaattttacttggaccaataattgttcttgacattgattaatttaactttaaattaaaactaaattgacattgtcaatggtacataccaagttgtcttgtaaaaggagggtatggaatttgattttccattaacttgacattgtcaatggtacataccatgttgtcttgtaaaaagagggtatgagattgatttcccatgaggcaccgttgtccttcccgttcccatatccatacctacgccacatgtcattctcccgaccaaagagagagaaataaagaggaggattaatttgcatttatcaataaaagttgtaatgccaaagtgttgcaaatttgtaacttgtgataactttctataagataaccgtgaagtaaagggtgagtggggattcttcccatttaagagtcataagttaggacaactaataatttcagttgggggacagggaatgggaaaagaagaatttgattctaatttctgatcacatgtaatagtttcaaagtatgtttttcaacaacaaaaggtcaatctagtgagatggccccccttacaatcctctttgttatttccaacaatgaaactaataattattaaaaaaaatacattacttacttgcaaccctatatatgaagaaaactcttggtcaaaaatattgtctaccatcttaggagcaacagcacttggaatatgcaggtgaggctatgaagcatgtccctttcccaaagcctatgaacttgcagtgggcatcacagcttggagtgtcttcgcatgatccaatacagatctgttggctgctcacagcatctgaaaatataacaataatcatggttgctactgcaagaataactttcagcaaaatcattgaaacaagtgaacgaggcactcttgtgtacgatcgacagcttattgtggcactttgtatcctgtttgttgtgtcttcttttttctgagtaatgatgttgagtgttgcagagaacgaaaatagtcctttaagatttacatcaaaataaattagtataatatatatttctctatcaaagagaatcaagtgtaattttcaaaagaaacaggagtattgtgtatatatattgatcactcgagagaataatacagtgtatgttttaagagctaagcgagtaatgtgtaatttcttcaaagtgagaagaatattgataaaatgttgttttcattttttaaagtcacaaacatatttttcaatccgttcttgttgggcaaaattataatgttctgttagagagtaattgttatgtgaatataataataccaatagacagaataaatatcaaaagcccagaatgtactaaaacataccaatataaaatataaattcgtgtcatacaaagtattatttatatagtgttaggattttttgtatgttctaaaaataataaaatattacatcgagttgagacaatatgaaatgtaatcacagttttttaaatcaaaccggctggttcaaataaatatcgtcctattattcggtccgtcacactcttaaaactattggataaagaaccgttcaaaaaccggtaagactagtcaaaaaccgtacaaaccggtaaaaactcaaggtgaagtaggttgaaccggtccaacgcaaaatctttaaactaacatcagaggaacatgcataaactaactggtcatcaaatataagacatactcaacaagttttttttttattattataagatttcatttcatgtataaattatttttaactaaattactttaaattatctttttcttcacctatgaaaattggaaaaaatgaataaattttcaataaaattaagatttttatattaaaaaaatataataaatatagacaaatttaatgttaataactaaattgattaaattttttattaatcatgaatttatcaattatatcttataatttaaaacagatgaagtaagaataactcaaattaatttttaaaatatatggagtttaatttttaaaagggactcaagcccaacaaactaagtaagactaagcaacccaaaaacttgctacatcagcatgcagcaaataaactcaaagagctagtgcaggacaaagccttcttaaccaaaagcatctgccaccaaattggtcattaacaatccttctgacaaaaaacagaggaacaacacgtaaaatatttttattgcaaacaatcttgtttgggtttgaaatatggaaaatctataaatccccgtcattttgtgttacaactctttatttagactataaaaatgtcaagatcatactatatcaaacataaactctttttaaatgtttagagtttagactgataattgatggatgcattctcccacggtcggttcattttgatttccaatgttgtctacactaagcggtacaatgtacaaaattgattgtcttgtacaattgttgcataaatggcactaaatcgtttccgctcaaaattatgaatctatccctaagttgagtttgttccaaaatatgataaaccacacagcacttatttatctatctatagagcatgcagaacttaccattccattcatgcatatacagcatttcattcatacttataccctataataaatatgtgtattaaagtcaaaagcatcaacactataagcgttggtgtttctataaaataggaaaagcctgaactcaaccatggttaaaataggttttctcatcaacatcaaatcggaatcagataagtatttacgagttcaaatttaattgttatgtatagaattacgtatccagggtatccttaaaaaatagtcccaagtgagagaaggtcccaagggtgttggtccctaccatcgctccacgtttatttaccttttttatgacaagaactttcttaaaaatagccccaagttaccaattcaacactatggatttaaaagaaattaaaagacaacacaaatattaacaaatcaacaaattaaagataaaaatgattgtcacaattaatttaatgggcttgatcttcgcaattttctttagtggagtcaccactaattttattgaaatatggaaaaaatgaaaaatcttaaaatttaagagtcgcatgtgcattggaaaggtagaaattaaatccaacgtcttctctaaatcacccatcccaatttttttgatgaaaaaatcacccatgccaattgattgtacaaatatttgttttcttattttaacataaataagagaaaaataattttaattccatgggtgaaacctactcatacggtgtagtaaagaactaaaaactcacatagtttgattaaaaataattgtgaataggttttttttttttataaaaaatattatatatttttaaatcaaataaataaacttcaaaaaatgacaaaagaaaatatacatcgaaaacggtaactcttgacgtctcaacatctcttgaagtaccacaattttccaccaaaagacttttttgatgcatctaccttttccaccattttttttaccatgttccattttgatctccattaatcttgtcaacggtaagcatgtggtacaaaattgtttgtgttgtaagtggttttccaagcgttgcttcaaattgcaaaaagaaacatttttatttatttattttaaacacctttctaatatctttaatattttttttatcatatcataagttgtataatatttatattatttttttcagtcactaggtgtctaatgatatgatggatgtccgttcatttttttttttttgtgtgtgtcggtccatccaaaattatgaatctgcccctacgttgagtttgttccagtacgtgataaaccactcgtttatttataagcccgaagaacttaccattccagtcatgcatatacaacattttattatggagtgagcttcttattccctcttcctattcacctttgcttgcattgttcaacactctgaatcgttcaaattccaaaaacttgccacttggacaatggaaactaactcttctaggtaagattcaccaatttctggggccacttccccaccaaactttggcaaacttggctaaccaacatggacccttgatgcacctacaacttggtgaaaagccacacataatagtctcttcagcagatattgacaaagagattatgaaaactcatgatgccatctttgcaaataggccccatcttcttgcttccaaattcattgtctatgatagcagcgacatagccctctcttcttacggaagagcttggaggcaactaaaaaaaagttgcatttcagagttgttgaatgcaaagcatgttcaatcactaaggcacataagagaagaaacgattataaacttgttagaaatgtctgtgcaaatgaagggtcaattatcaatcttattactaaggaaattgaatcagtgacaattgctataattgcaagggcagctaatggtacaaaatgcaaagaccaagaagctttcgtgtcaacgatggagcaaatgctactgctgttgggaggtttctcaattgctgatatctgcccttcaatcaaagtgcttccttggctcacaggaatgaaaactaaacttgaaagagcacagagagaatgacaagatcctagaaaatatggtcaaggatcacaaggaaaataggaacaagcatggagtgacgctcgaggattttattgatattcttctcaaaactcaaaagagagatgacttggaaattcccttgacccacaacaacagcaaagcactcatgtgggtcggtatgcattattctttaggattactttgaaaatttccatatatacaactatatacatagatatgaaatttactaacataataaattacacttaaaatatatacatatatatataattgaagtagcaagttattaaaatattctttctatgcaaataagtgattatacttgttttcttaagaagatatacttagtttatcagatgatgagctctaataaaataataaaattatattttggttacttattaattatgagttcgaatttaaaaataatctctattttatatatactttatgatcaagaaaattaaagttttaccagttaaaatattttctctataaaataagtagataacaactctctcttttcctttctttctttattaaatagattatatttcattttcttctattcttcttttttctgttcctcttaatttaaaagatatggattgaaataggatttttattttatcctattatgaaataattaaataatatttttcatttcatttatttggttctattttaatgaaaaacagaacaaactataccaatcccttgggtcatccttaaatatctaaatgagcttaccaattaatagcaggaaaaacagaacaaactatacggctataccttaatcccttgggtccacctcatcactccccctgttgctaattggctacatttttattccttggccaatttcgaaagggtccctaaattattgccttcttggaaaagtcttcaactgcctgggtgcccataccccatgcccattttgctttgcttctttcccaaagacgtgagtgaggtctacgttgcttttattttttgggaattgcgatgcgatgtcacataagccactactacatatgtttttagcaacatttaactacttaatgttatgaataagaccattttgtaacatttataaaaccaaatgttactaaattatgatattattttttaaaatatttatacaaagttaaaatattgtcaaaatatttttcgttacattctacgtctctcaccgcacgtttgttcatgacaatgttcccacatctctcacgccaacttttgtcctctgtattcttatttttctcacattgcagtttcttatgctgctcatcctataaaaatttaaaaattaataaattaaaatattatttgacccttttttatttgaaatgttaatactagttgtaattaattttttcggaaagaggtaccagctttggattgtgctacaccacatatttagctttattatcaagagtaaattatactattcctggtgaaatctctcctatttttttttatttatttcatcaataactctttcgattgtttgaaaaatattacattgataatttttatatattacactaattccttaattgtgatcatgttttccataagaaaaattgttgtaaacattagaaaggagtttgacaagtatacaaaatgtcattagatattaatctaatttactctattaataatgttctaaattagattgatggttaattaatttcaggacatgtttgttggcaggacagctgcaccaacagcagttacagtatgggcaatgtcagaactcatgaaaaatcctaaggttatggaaaaggcagagactgaggtaagaaaggtcttcaatgtgaaaggttatatggatgaaacaggccttagacattgtcaatacttaaattcagtcataaaagaaacaatgaggctacaccccctgtgaggcattattagtctcaagagaaaacagtgagacatgtgtgatcaatggatatgaaatccctgcaaagagcaaagtcattatcaatgctcgggccgttgggagagaatcaaagtattagatgaagcagagaggtttgtagataactcttattatgatttcagtggcacaaactttgaatacatcccctttggggctggaaggagaatttgtcctggacctgcattttccatgccttacatgttgctgtcactggctaatttgctttaccattttgtttgggagctgccaaatggagcaatacaccaagaattagacatgactaagtcttttggcctaactgtcaaaagagcaaatgatctttgcttaatccccagtccttatcacccaacatcctaacttggccatcaataaaaactatatgataacctggctaggtgtgcttatttatctttatcaagtgtattagaacgacgtgtggtgataaagtgacttgtggcgtgtttgtttcacggattaaaatgaatttatgagaatataatattcttatgtatgttatgaatttggaaaaaaatattattccttaaaggaaaatagttataatgatttaattaacttttattttcatgaagagtgacaaagatatatttccatgaaattgtaggaaattatgttctaatccaattataacttacattttaattcttgtttttttattttaattattttaattttgaaaatattaaaatttagtcaaacacacttttaaatatctcaagaatatacttaaatgattacgggctatttgtttcacagccagaaatgtgaatttttcatgtttgttaagaattttgaaaaatattcttgagtattgtttatccacattaaaataatagttataccatcatttaattcatttctattcatgtgataagaggtgaaatagttatatttctatggggttgtaggaagctatacatgttcttgcccaattataacttccatttcaactcttattttttattttaatttaaaattttagtaatatttttagtaatattaaaaatagacaaacacattaatatgaaaatgtgatacaacatcattttgtgaaataaacacattcttagagcatctttaatgctatatcttgagcaaagatcttgaatttaagatttgatcttcaccagatcttccaataaaagaaatgaagagatctccaacatggagaataagttcttatacaaaatttctcaaaatttgcgcattgttcaaaaaagaataaattttctctctctttatctctccctaagatctcaaattgagatctaccattaaagaaaaaaattagaaagattttaagagatatttaatcctatgtggtactatagggtccaccaaaaaatggtataagatctcaatttaaaatctaccactaaagatgctcttaggtgtatttaatcagacatattattaatttatctttattttttctttaatttattttaaaaattaatcacttattaatagttaattatttctactatttttttgaaaaataacgattaaaaagtaacacttccaaatatgtacaaagagagcaatgatgtgaagtactcctttattaatgaaggtgatagatttaaacttcttaccaataatgtagctaaggataaagatggacgggtgtcctcttgaattacatggctgtattctatcactatgttaaggataaatatgtataggcgacatttcattatgtaaataattttaatttggattaaatgtaatttttcatcatctattttatttaatatgtaattttgatttctctattttaaaattgagatatttatttcttttattttaaaaaattcataattttgttctccaatttcaaaaatacaaacatttgatcctcatattttaaaaaatatgtaattttattttatgtattttatattttagaaaatttataattttagttaaatctttaattttgtcaatgtttcattttttttatttctataattaattaaattatttattaatgataccttaaatgaatattttagatttatgattcaattaaatcaaaataaaagaaataaaattagacaaaagtgagaatttgaccacagttacaaattttttaaaatagaaaaattaaattgtgattttttttaaaatagaaggactaaatgtttctattttgaaatgagaaaattaaaattacaaattttttaaataagaagatcaaatgtctcaattttaaaatagagaaatcaaagttactgaatgaacaaaaataggtggaacaaaattacatttaattcttttaatttaacaaagtttcaatattatatttattttaattaatcaaatagttaacattttaagaactcaccgtcttaactcatcattaggtgacacaagtatgattgtgtggctgaagtaattgaggttgtctttgtttatcattgtctcgatcataaggataaattcatagcagctagccaccataatatttaagtcaattagtattaaaatgaaatccaaataaagaaattaaactctagctgatttataccttcaaattacatccttccaagtcaatttaagatttgaaatttggcttaaactcaatcttcaatgcctataaataaacatataatatatggaaaatgaaaggaaacttcaaagatagccttaggctgaaaacatttaattgcaccattgacccttgatttgtgctttataattttttatgtgcagatttgtgctttttaattgcaatctagaacttggcatattattttatctcgaactcctaacaaccattttaatgaattgtcttttcattatattaattttatgtttttttcttgaagaattgactattgagggtgaacaaatacatgttctttttttttttgttataaatgtttaaaatttactttttttgacagaaatttaaggccaaaaggaagtatattatataaaggggtgaataaacaagaggtgcagacatccaaatcacaagctgtgaaattgaatctgcatcaaccaaaaaaacaaccgtaggaagttacatggaaaaccgaataccccaacaaatccctacgaggcatacctagcataataagtaagaaccccaaagaccttatcccgtgtaccgatttccatcgacggtggtgtccctatgaggagagacctcacccgcgatacaaatcaaatagcatcaccaaaattaaaacagtcctttcaagcaaattaaatgacatgcttgacattcaaaaaaagagaaccaaactgtattattaataagctctatttagtttaaagttagaatttattttaatagagatatttttaaaactatgacgtgtctcttaattttgctgtaaaataaaatatgtctgaattttagtttagttttttatattaaaatgtgtgtttgtgaaatattaattctttgtgtaaagcaaagcaattaagttcttttttttaaaaggaaataatttatttaataaaaatgcaggaagaagaaacacaccacatcatatctatgtttaacgtgagacaaatatgactttaaagtttaacgtgagatacacatgactttaaagtaataaattatgtactacaatctaaaagttttccatgctcacaaacataccaaataaaaaaaattaatttgttgaaaaacacttaatctcattaaaacttaattatcctcaagtagaagatcgattatcttgagctcaaatttaagcttcaccatttcattctccggcataatcatggtcacaaacttcccatcaactccattcttgatagaaccttttggccacggatacaccaaaacaaccccttcatctccaaccccttgaagggtgtagtaaacaaactttggtgtttgtcccttcaattgtaggtcatacacattggtttcttccaagtctagaaatgtcaaattgacaccatacacaaagaaatcactcacaccttggtctctctcaactgcttcctcaatttgcttcctctcatccacaccttgatccgcaagcatgctagctaagattgtcaaatcagtgtcaacaattgagcattcacttccagcctcaaccttgcatatcacttggttgttacctatgatatcatttgccctcttatacgggtcggttctacacacggtcacggttttaagttcggatcctgatcgaacccgagccacgcaatgccaaatcatggcacatagggattcaaaaggaggagtttggtcaagacttggaccccaaattcgtgcttgcaagtagttcaaccgggagctagttaggtggaaggagaatgtgtccatttttttgttgttggctgggatccaatgatcccccaccgggtcaaaccgttttgctgaaactggatccttttccggctcgggttgtctgagtgttgggacggatcttgggatgttaaaaagctttgttaggccatttttcattattaggccccatgagttaatgaatcctgaagccgaaagcgggtcccccaatacatgggcccaactaagacccaatgaaattccaccgcacttaaatttagttacctgcatattgatcaaacgaaaattgagttacctgcaaaagccaagttgtatgatttacagtgatagaaggaataaccatctagaaataaattttcagatttttttttttatatttcgtctttaccaagtaaaaagaaacattaaacgtatttatactcttttatctaaatgagattttcaaatttttgcttctaattttcttatgtaaaattttgcttcttttactattattgtagtaaggatggaacattttaaaaatggagataagacatcaatgatattaatgtaattgtcttttaaataactttcgattatatttaatgattaaaaattactcctctcacctaagacgacatctctcttaattaattttttaaaaaacatttttttattatgcaaattaggaaaacatctttctgaacttttcattcccttgttcgtgtattaagcattaaaaaataaaaacaataataattttaccgtattattatttttgatgacttgtgtttaattcgacaatttgttgtatataatatgtaaaattatattaaaagtccccaggaaaacagtctttatcgaatttaaacgtgttaatgattccttaaaaaaaacgtgttaatgataaacttcattgtataccaaaaatatgagcctgataaactcgattctgatcaatatcggcgtatctatatagaaagagtctgatagtaaattaaaacttcattgtataccaaaaatatgtgtatgataagatttaaagataggtttaaatactcctacaatatccactttgttactctatgtagtaggtagtattaaatattaaatgcttttatttataagacattaattgtatttattttttcatataatatttatttattaaatgttaaaaaatttataagaagattaacattactaaaaatcaaaatattacctcggaattatttatatataaaaaacaagtaataatgtattttaacagtatacaagattctgtattaatgataccacctttttctttttttttttgttgaatagttaggatctaccttatctctcttatgaaaggaattgtccaccataccatactatactgcgttctgaattaatgtaagggcaacttatgaagataggatggtattaacatctctaccagaaaaacattgcgactaattaacaggtcactatttcaaccaaaccaggacaggataaagagggggttttcaccaagagaaaataacttcattatgaatcaaatgaaagtattctttaattaattcttaaataaaaagtaagtaataagaatttttacgatttttgagtataaagtcttaaaaaaattatgattttgattttttttaataatgaaatcataaaaaattcaacgactttattttttaaaaatatttatataataaatttttcaccactttaaaattgtgattaattttaaatgattttaaagtcggtttaattataattttatatttttgtttctactattttatttttctatcatgtagttggacactataagtctacaacttcatttttctcctatttcttttccttttaacatacttatttttaatatatttttcaatcaatataaaaaatgtatttgtacaaataatgaatgttttttccttttttttataattttatatttcatattattgtatttctattactctacttttgtgtcatactatcgtgcaagacaagttatggtataactgattttatttaatatttttatattttgttttgtaatttattattatttgttaaatttagaaacgaaaaggtccaaacaatataaattaataatataaaattaattccttatttattttatctaattattattggttaagaaaatattaatcaaaaaataattaatggttaagaaaaaaataaaagtcattggattataaaagaattaattattttaattttaattattctttcaacgactttaaagtgataaattataaaaaaaatattaattataattattttaaattttaaaagaactaaaaaattaattataaaatataaaattatgattaaagtaacttacaaaaaaaacattaatcacgattttgaaatagtgaaaaaattatgactttatataaataattaaaaaattaaaatcatttaattttttacgatttcactattaaaaaatcaaaatcatgaattttttatcactttatatccaaaaattataaaaattcgtacgacttattctcatttaaaaattacttcgaaaattactctcatttaattaattgtaaatggaattatctctttttgtcaaaattcctatagagtggtagggtccttacgcatgttttattgtactatattgcgcagagggggcacattaaatgaggaatattttaatcgtccattaaaaaatttatatttgagaataaatttttacaattgtatgatttgttttgtgtatattatcatatgtctagctgttatttttttaataaacaattataactaactaactgttttttaggaaatggaaaataaacagaaaaatatgattttcaaattttcttattctttaaaaaaatcttatttaaatttcaaatattttatctttctccatcttcttactgaatgaaacattggataaaagagtcgatgagaaatacgtgttgtacagctgtagtcactagcgtagcaggactaaaccccagttagtagctagtagctactctttttattgaggcattgattattgtatttggtaatccttcgcggctcacaaactagtatacaaagtatatcatcttttgaaatattaaatcaacaaagaaagaaaaacaccagtagtcctcaataactagggatgtggaccatttcatgaaaaaatatgggttggattgagattttgtgttcatatttattaaaagagtttagttgaactagtcggaccatcctggcctgtaataatgtaggtcaaatgtaggccagagccagtccagtccactaggttagtagctcaccaataaaaaataataaaatatttaatacgtaattaaataaatggtttagaaggagagtgattaagaagaagtgtacgattttgaataatccctaaccctaatatattttcatttagaatctaataatgagttatactacatgtacaaatatgttttgattgtctgcatcattgtaaaacacatttcttataatatgttaaaacttaaaaactaattgaaaatcattgttaaacatgtattccctggttgcttttacttctattagacatgtatttatattaaaaattattgttataagattaagttaatacatattattaatttttagtataaataattatatttaattttttaaaataattttttacctttttaaaaaaaatatttatttatttattttttatgggatggcccgctagtccactaacccactttaaagtgggacgagctagtatttttagcccactttgcaacagtgggtcagcctcgtccgatccacttttttgataggttggaccagtccagtccgtttctgggtggactgatccactttaccatccctatcaataacatcaacgaacatgtcgatccaaccttaagtaatttacatctaatataaattttaagaaaaatattttattttaaatgaaaatatatataatatattagaccttttttgttaacgtataatattatttttaataaatgtgtttttttatattttatataaactaaaaatatttttttatgagtctaaagctttaactttgtttgttttatccttaaacaggactaccaagtagctagggaaacaacgttgtacaactaaatttgtatctagagaaagttttaattaacttttttctttttaggaagaaaacttataaaaagtctttggttttctgtttataacctttggactatatttggatggtggaaaataagctttaatttactttatatatatgtttgataaaatcactttcaaggtatttataactgaatttcaatataaaaaaattctctttgtcaagtaggcgaaagctattactacttcacactcaacaaaaaaccttatcgatgcaaaataaatatatactccgaaaatatttttatactgtattttaattgttcattcaaacgaatgacaggaaggaaacagctaccaaaaactacgagatgaagaccccatataactaatgaatacgggacatcgtttctcattgatttttgattttcaaaaatatattttccattattacttggtaaactagagacaaactagacgttcatctcatagtgttaattagtactacaaatctatgaaaatattaaacaaaaaagtaaatatatacaccaaatttaaaacataaagctctctctcccaaaataaatatcctcttacattattttacaaaaataataaataaatgaaggaaaataatagtctttcaaaaaattaaagtgatatttattagagttattggtggaaagtcattctctttctaacactctctttgtgattaattattttttaaaattatcaattttgataaattttatatctaaattataaaagagagtcattaaatgataagtgagatccatcaaaacttaaacaagtttcaaccaataactaaaaagtgttgaaaaagagagtattaaaaataacgtcactaacatttctcttgatgaaaaagagaattaatgttacattaaaaagtcaaatacaatacttattttgaaatcatttttttgttaattgcaacacatcggatgtggaataaccaatactcaacattcaaaagaaatataaagattaataagaaaatcttcctctaatttcattgtggcctttcggtgtctattttcctttaactttattcatcagttaaatattaacaattaaaaaaccttttatctcaattagtttgaattggttgtattttgatttcgagtgtgaaaattatagaaatgaaatattccatttcatgattaaaaaaacactaaaaaattcctatgaaagtagtactaggttttgtcatacataaaaaatgaataataactaataagtgtgtgtcacgagtgatgcataatatataaattagtatagtatgtatagggaaattattaagcacctgcaacaaaacaggaggagaaaaagataattctgggccaatgacttggtgagagacgagcaacttgtacaagggccaatccttcatggctagccactcatctagggttttgttgcacttggcctcaatgaatcttgctccacaatcattgcacttgattaagggcctacctgaatccgatcgccgaaaccggccacatgtgatgaagtaatggttgaacaaagtgaacatgccatctttaattttcatgatggttaggtcttgtgcagcttcattatcaaagaagtacaccactctaaggtagtgaagcttcatagccaaatccaagccactagggttatggaacacatctgacccggtggcccggcctggcccaaccgaggatagcctcacatcatgcactacacactcttctaagaccattttggtttgatcctagaaattgaaagcaaactctttggttggtgggatttttttttgcttaacaaaagagagagagagagagagagatcacaagggaaaactggaaaagaggctttgattgttgtactaaagtgagtttttgcctacgagcatatatagagtgatggagtggtgtcataagtgaaggaccatggagtggctggttggagatttaatggaaacttactatgcgtttcattcccattgggtcgtacgaaataagcggttggaaatgccaaatataaatattattttttgaaacattattgatcatttacaaaactattttttttttaaattttcttcatattaattatttttattaaaatactgttaactattttagtccataaataataaatgctataaatcatctttttttctttttcttgcgaggattgaagtgttgaagaaattaggtttaaaaactgaaactcactgttattattctctccatatattaattatttagataaaaagtaattaactgaaaaaagtaacataattagtccaaatatttttaacagtaattttagataaaattacatttacaaacaaatttaatgttagcacttaaattaactaactttttaaatatatatttaaattagttataagtgtcttatattataaagacgaatgaagtaaaatattattactttctccatcccattattattgttgtgtaagaaaaaaattcaaaataattgtcatattaattttttatgtaatattaattaccttttttacttatattttttgtaatattaatgaataacaaaatttataaataaattatattgataatataaatttaattttataaaattattattctcttatttatttattattttttcttaatctatgtaaaataagctagaatgattattattttaggacagagagagtagtaaatatcttaaagatacttgctaaagaaattaataaataagatatatattaaatttgtactagaaatcctgaaagaatatattcttccacaatatttattttgatttttttctcttacagaacatttattatgattcagaagtagtaatattccatttctgattaaaaactttccacttttcgttatcattttccgtatacttcctctatttttttaaggatattcttctatttctttttaattgttgaattcttttacaaaaattggttactatctaactgttattttttaaaaaaaagataatgttaattattattttatcaattatactcttatttttcacttaatttttaattattttacacttatgcatttatttatagaatggaaatgaagaggatataatagaaaagtccacacgaatgtcatttgaataaaaaaaattattacattttgtgtttatatagaaaccttaaaagatagataaaaaaaatgaataaattattttttagacaaacattaagaacactgattaaaaaaaataaaagaaggaagctttttaataaaatacgtaaaatcatgttttctttgattgttaaatacattctcatataatttcttttacgattcttgctttcccttttatacccggactcatttactaataatgcgatcaattttacattgttccccacattcacatggcaattaatattatagtctggtgagtggtgacatctcaccgatttatagaggaaaatagatcgatgtcatccacattggtttgttacgctttgcagctgcgtatttatagtctgtcgtaaaggatatttataatcctaaataagaaaataacttcaataatttctatgaattaggtgtttcaactttcaataacgtttgaaccggctaaaacttatatatatatatatatatatatatatatatatatatataccatattattaatataaaatattaatcgatttttctgataatcaatatataactcatatcaacaacttcttgactcaaactatgtacggtttggatgttagtaggaagtatttacaaaaattcagaaggaataagtatataaacactcaaactgtgattttttaaaaatcaatattataaattttaaattattttatttactacccaaattatattattagcttggttattttatccagttagttggttactcctaatgatttttttttaaaattatcacactaccaatgtttcaaatgtacattgtgattatgagtttccatgtaagaatgaaaaaataaatcatctaattcatataatcatatttgaatggataaaatttaaaatctcattattactcaaaagagttatgtaacttttttaaaattgtgcataatttatgttatttaagcttaatcatttatataagacatcagacttgatcgaaaactaaagcaaatacagttcgtatattttaaacctgatatataacttttatttaaaataatgttttttttttaaaactgttttaggcccatatatcatattggattgtcctgtaagataggtgtgtactcgcactttaaattcgagtaatgtatatatagactattaaatcatatttatattatcaaggtttaaagaaaatgtacgtgactttgttacttaggaatcggacaactacttataatcttgaccattcatatgatatggtccatatttattgctcttatttcttacactaaacaagtgttgtcgcatgaatagttttcattctcatcagattcaagaaatctaatgatagcctatcttacatttttttttaaaaaaaaatatataaaaaaaatactaattacattttaactccaataatatatataatcaataaataataactaatttttaaataaaattttaacaattaaattacattttaaataaatatataaatttacctttttattaaattattattgttattttattatttaactattaaataattattatattttaaatatattgagggaagagtagagggttgtatccactttaagaaattgaagaaaaaaactcaactccaacctcaatcttgattaaagtgagttttcatgtttgagtgtcaaaattagtatggctgaataacggggaacatgctttcagaatgggggagcatgctttcggaatgcacaataccatgcatgcccaacccaaacatggcgaggccaactacaattaattaatgtccattattttgctcacaagatgtacttcgatgtggagggccaacgaattccattaatacatataaattttttttaatcatttactaatttttgacattcgatcttacgtttcatctaaaaaatcacaatgcaagttatttattatctcaatccactccactcatttataggtactattaattacgcgtattctttattttgattcattatattttataattattttattttaatatattaaattttaaaagttttatttttatcttttatatttttaaacgtattgtttcgattcttttttcaatgttaatagaaatgttagtgctctattaatttttaaaattttaaaataatcaaattaaatgttatatttttgaaaataattgatgaatgaaattattatcgttattaaatgattaaattgaatgaataaaataataataatataaaagtgatagttgttgtccgtagtttcatatctatatttttctaatttatttaatgatttttaattttttaaataaaaaataatgatgatttttagtcgttattatattaatttaactattctaaaatttaaaatactcatagacattaagtttctaataaaaaattgaaaaaagaataaaaaatgatacattttaaaaatataaaatatcataataaaatttttaaaacataatatacaaaagagaaacaaatgtgaaatataataaataaaaaataatattaaattattttaaaatttaaaagttaacataactctaatatttctaaagaaaaattgacaaaaagtatcaaaatcatacattttgaaaatataaaaaatcaaaataaaacttttaaaatttaatgtataataaatgaaacaattgtaaaatagtttttttgtttttaaagaaagtatatctaagttgtttttttaggggaatgatctaggttgttggaacaacaatattacatatgtataaattatactaatattgcactattttttactgcagcactataaatattctaacaccatttttgtatgttttttttttttgcaaaacaaaaaaacggcaaaaaaaattataagatttaattatattttttatcctcagtttttttttattattggcgaatttaatgattgggaataaattttgaacttttttataaattgatgataaaatgtgtcgaattaaaaaaattaaaaactaaaaaattagtaataaaaattataattaagctaaactataaactttatgttattaatgaaacatgcaagctagtaatctatgttggaccaacactgacctttcctgcgccttccctcactttttacaaatcatttcaatttaatttgagtttaaatttatgtaattaatactcgataagtataatttaattgcaagcacacgcttaatttgtgaaaagaaagtgatatatccaacctttgtagtttgtaccatatatcaccggaacgaatccagaaagacattaaaagaaggttcaacttttatacttttatttaagtatctaatttctcattgataattatttaataaatatatttaaaaaatatttattatcagttttatgtgtaaaattaaaaccaaaatcgatctactactaaaagaaattaagcattgtaccaaaaaaaaagcatacatttactcaaccttctatttattaatttattttcttttgtcaatattttttaattttactctttttgttttcatgtatataaaggagcatgagggcccttgtgcccctcctaaatctgtccttgtatatcactatcatattttttttattccattatttatttatcttgactatcattatatagggcgcgcaacaacttttacagtaactatatatcaaaattattttttaattcctatttaaaaaaatagtatttatgtaggaattatatacgtactataatgaacatatgataattaattggaataaataaagtacacgtgaaaatttacatataggaaagtaaaagatgcaactaattaataaacacgatataatgcatataatgaaaaatgaaagtaccacttcttatagatattgtatctattgagttataagattgatttagtaattgaataaaaaataaagaatggaggtaatggatttgagtttattaatgaataaaaattagcaaactatcaactaatatatgattgatctaataaaaagtgagactaaaaataaaaattgagaacgatcttttttcctttaaaaaatgatatctggaacttttttttgtttatatataggaatggaagaagtattgagagatttataacaattcaaatattttttttcaattttgaaaccttttaaccaacatattagatattttttacttttaaaatgttaataataattacaaaatttctgtctggaagcctaaaactcgagatttaattagttgttttatttttgaacaagccattttagtatttgtcaacaaaatatatatatatatatatatatatatatatatatatatatatatttgcatttgcaagctgtcaatactccattttatcaaaatttcgggatctaaccttgctaattcaagaatttcaactcccccattcttgcaaataaatatcttcggatcaaaataaaatatcaaggctctaaatcagccgaaaaggtatttccattgtccccattccccaacctttttgccgttcgtgttactgatgcaacatgcaagtatccaactcatctcacatgcatcgatcactttcatgttcatcaaccttcatcgaatttaaacaggtgtcaactgcctattgatagaaatgaatatataatgtcagagaaagtagttgaagtgaagataatagtcctacatacatttcatgttgatgttgataactaaatccgggttgctaagttaatatgccatcaaagtcttaaattcgatgtagttttattggtttatagctgacacctagacacttcattttgtccattgagctcaaggtaaaactaataactttgtgcaggacatgcttattagtttttgtccatagatcgaagtctctgtcaagttaaaagttttgaatgctcagttacaatgattttgattttaatttggcttatccaaaaaaaatttaaaaggtttggtcatcttacgtgtaataaataggtttaaagatgctttttcaagttttttaattagttttatctaaacttttgttatttaattatattgtgattgtggtgttttttttttttttaattcttattttttagtttttattagtatgttttatcattatagttagattttcaatatatttattaggttgtttaggtaagataagcatgattcaatgcacactaatgaattttgtacactcaatagggtgcttggctgagcattctttttgcttcattccccagcactttttaatcaaacaaattagcttacaaaaataatgccagaatatagcagtgaaattaagcatgggcgtggattaattactctcggtgacatgacattcagaatttctcttcaatataagtagtgggcatactttatcccatgagttaattctcttagctttatcctcttagcttcaacatttagtaggaataacactacaagaaaaaacgaaatttcagacggaaaaaatccgtcggtaatagcaaaaatccgtgggaaaaccgattttgcgacggaatttccgacggataaaaatccgtcggaaaaaggggcgtaggaaatgttaggcgacggatatttttttccgtcggtaattaccgacagaaaaatccgtcggaaatggctcgtgggaaatttccgacggattttaccgtcgaaaatactcgaattgggagtaccagaagcgctttctatgtcggttattgaagccgtctttgaatggtgtcctggaaagtcggtaccttctaagacggtttttaaaataactgtcttagaatgttatttttaaaaaaataaaaattgatcattctaagacggtgttttgcagaactgtcttagaatgtctttcttttaaaaaataacaaattcaataaacctttttttgcataatccttgaaaagttgtgaataaaaaaagaaaacccttaatattattaaaaccactcaccacatatgctccacaatgcttacacactaaattgagctagtatttcttcactaaattgattattacacataaaagaataatatagattcaaaagttaatcactgacttttggaatagtttaaatgagactttcttcaaactcaataatggattttggtaataattaataaatgttagttgaggtagatgttaagaatactacaaataaacataagagagataaaggaataagaacagaaaaattgtaactaatagtgatatatgcacaaaaacatggacagctttgcttcatattttagccatttggctgggtgttttccttgcttttgtttctttagaatatcccagactccccctgctttatttgctttctaataatgctttcttcaataaaacacattactgtaaatgcaataaaactcagaagcagacattctgaagaaatttatctcaagataaatgtatttttgtcacatcacgcatttagaaaacaaggatttttttcacccacaaaaaaaaaggaggaagttgtttactccatatttctcaaacacgtgtaatctatcagattttgaaataacttgtttctgaaaaatattacctttcctgtaagaattatctctctgagtaggccaactgcattgttttgaatgagatattctactatcttacagctccatggcaatttgggatcaattaacaatactaaaacctccaataaaggaatagctgagacattcaattcctcaggagtaaataaaagctaatcccttaactgatttctgtcaagttaaaaattaaataagcaagttagcaaagaaagcccaaaaatacaaatcagcaaaaatataagggcattttttggattattaaaaaaaagagtacagcaacatcaagaccaaaggcatgataccatgaagagtacaaatttctcagttaacttatgaaatacttgcaagtcatccaatccaatggccaacatatatgcacaggagggatgaagcactatttatctagtaaccatcatataggacatttttggtcacttgtatttctcatcatatagaaatagaatgctaagatgccccacattggctaggaacatggccaaacactccttatcagtcttggttaattcacatcaatttagtatataaaaaaagacaaatagcatgtgatttagtatataaaaaagacataaacaaaatacaatagaaccaatgcaacatgaacaggacaaaacccttagcagcataaccgatatcttaaaaggatgtcagttttagagtccaacatgaatatgacgggtaaaaacaggctagagaattttaaagagtcagctcagaaaaggaattaaaatatggtcatgaaacaaacctattctgatgcagagcacaaatacaagcttgtacaaattgcttcactcgacagttcaccaaagcatgtgtcaataacaaattccaactgggaattctggatctggtaattccaatgaaaattccaactgggaaaacaatgtcaataacaaatcttaatggggtgctgggaatgaaaacaagaattccagctggagtcctgggcatagtgatgctggacatgaagattccaatcagggcaagaaaagcaattggaactctgggaacagtggtaaccaggcttctgctcctaacaatagcaattggaactctaacaaatcctcttggagtactgggaatgaaagtaattggaattctggatgtggtgattccaatcaaaacaccagttggagaagcaataacagctggaacacagcaaatgcctcaagcgatgatagtgtaaatgaaggttcaaatgaaaattccaatggagtaggtggtgggaactggaccggtggttaccggggtagaggtggctcggacagagagcgttttagaggtagaggtttttggggtagaggagaacgtgatgggtttggtggccggggagagcgtggtgggtttggtggtcggggagagcatggaggctttggtggtagaggtagatcggacagggaaggttttggtggtaggaggggatcagaaggaggacgtggaggccgaggcaggggaaggaatgatcaatctggtggttggaacaacagaaggggttctggtgaggatgggccctctgactggaagaagggggcagataatgatggatggaagaatattaatggatctcaggcttggaaccaggatagtggtgacaaggataggcagagctggaggcagggaaatgcaaatgaggagcatcctagctggaaccgaggaagtggaagtaatcagagctggagttcagcaagtggagctaatgataatggatgtcaggcttggaaccagggaaatgcagataaggagcatccaagcatgaaaaacaggctagaaataagcagagctggagttcagcaagtggaggtaacaataattggaacaacgaagggtcgtcggagattgcagaagctacggacaaaaattgtcacaaaaattgccctgtctttaataacgtgcgtgacaatgtcttgttggtctttttagtgcagtgctcttttttattttcaacttacccaatcaaaattgcctgctatataataatcaaatagtatatcgaccagcattatttaatactgattttatctaaaccagcatcaacacaaaggtactgaggggctctaattaatcccatgaaaatcaccacctagttgacaaaaatatatattctatttgtgctaatatctatgccttttttctggaacagtataagtgtttaacaaatctataattcaacatgaaagatcatgaatgtgactgcaggaggtaactcagccattttttgtttctgacaaagatgatggataaagcagaatgtgaaactaaatcatttttcaaaataaagaagctggaaattcattgttgagtcactacaacctttttttacaacttccattcttatgacatgttatcacagttcatgtttctatgttaaaatttacatgatttattaaacgagagaattcatacataccaatttgaggatcaccagtgtttgcatcaatattacccagaaatccattgatccttgctgtttcgagctcatgatgacaactaccaggtacaacagaagttataagtacaaaaaacgtgtccagtttcaattatgatttatgaatatcaaatttaaaagggaaagatcaaggacagcccatgtaaacacaatatataatgatcaattcacctgtggccaaagatggtgggcaaagaatggagatctatcataaattaccaagtttttgttttcttcaaaatactatagtcatttgcttgcattttgcaattctgcatggaccattattcagagatatcacaatcaataaaatataagaaagatacttggctgtgaaatatttttccactaacgaagttgcgttcacgaagattaaaataagagtggtcatacttttaacctcagcaaaatgtttttaatatactccttagataattattttttacatgcctgcattaattaatgtccaaatctggcataggttcacatacatactctttttttatataaatttttgcattaattaatcttacttatatggagtatgtattttttatcagattaaaaaacaaaaaaaaaatgagaaagagaatattagtggatatttttaaattgaaaaaataatgaattatttttaaaatataattctatttttttactgcatttaatagtagtattttttaaataacagaaaaaaatgcttactagtggtatttaaatagtagtaataaattacattcaagtttttgttttcttcagagatactatagtcactctcaattagtcactctcaagaactagtgtcagagctgttgcattaggatcaaatgccccaccattaggatcaaaggtcccaaatcataaagctatgataagtatattaaaaaaatgacctttttctcacagactacactaaggccattttcaaggccatcctctagtgcattcccatgcaaatgccgagaaatggaacattatgttctcgagcatacttagcagcaagaattttgcactcctctatcacataaaaatgaagataaaagtataatttatttatttattttaaaaaaataaaagtattagtaataagtgtatatgtttaggcgcacagaaattattgtatttaaaaaagtgtttaggcgcatagaaagtattgttatttaaaaaaaaaggcatgttttgttaataaaataagcacaagctacttgaggaatagtgaaaaacaggactaaaagataatgtaattaattaatataaaggatgtgtaatatatacgatggcaaaaaataatatatatatatatatatataatattatatgtaacatctaattttattttgtggcctatattgcagccctaacccccactgacccttaccactttgggtatgtatgaatatgatcggatcagtggttattttgtagttacaacagggtggtaaatttacgtttatttgtgagcatctatccccacaaacacgtaaaaatcaagacttgccaccattatatttggcttttttgattgttggttttgtgatactgtgatctgatgaatgacacgttaaattaagttgaatcagacattagactcaatgcaaacaagccaatggcacactcatgagaagtgtttgtgagcaaaactataaatatatgtgaaaattactgagcaaacctgagataaactatgcaataaaaatatatcctatggaaatattttgaacttgagttaaacactcatgaatttttttatatttaacctactcctttatttcaattgaagctatgcagttcctcctctgtaagagatcgcttacaaagacagaaatatgaactaatgtaaatataaataaaatgaggttcgctcaacaactagtggagattataaacctaacttagattcaaacgttctcgctgctcagacataaataaataaataaatttcacatactttgtgaataagaaattgatacaagtaacaagctgatcaatatctgtgcatcagcttaaacacatgttaagcttaattcagcattttgggtatcctacaattgctccaagtatattttacagggccaacacaattgaagccaattaatgatcaagaacatgttaaaatggttaatgatcaagaacaggaaaaaaagaagttatatacctcatcaactacctctatgagtgtaacatcagacttctcagatttactcttgaaaaatgattgttgttgcagagacatgtacctgcatacacgcaacataagttaaatcatgtacaatttataaacttagtacaagagccaaaattataggatggacacaagagccagtgaaagttattcttagcatgaaaagaaaaatgcatcacttatagtaataccttcaaacaacaattatatcaaatcaaacaacccaaaattacaacgcttaaaatttaaattttagtatatatttatagctaaagtattgcaagcaacgctgtatcacatgattcccattcatatgcataataagagcaagaaaaccagattgaatggcagacctcagcattgcaatttgttttctagagtcaacagtcataataattttgtaaacaagagggagcatacttgcctgttgtaagagtcccaagcacatttctcacaaccccaacagactgtacatttagattaaactagtatttgacccgtgcgcatacacacgggttagttatacatttaaatgtacattatcgcgtaatgcaaaattggaggtgaaaaaagaaaatataataagattctaaaactgtatctgttactctaaatagaagtaaacatttaccccaaaaggtgggtagattacccaagagccagaatcatcactccttgaaagtgaagaatgttaattccattcagaataaatccatatattcaccaaaagtaaacgcctcagtatcccatcactgcacagttatacacaaagcttcctgattgcctgctagcaagcaggttccactcacgcacaccttcacctgggacacaagcattgatctcaattagccttctatctaaagctcctgttcaaaagtttattcaaaacttcaagcagaacagaatatgtgatagtcttatggctcagtccaattgaagaaaactacacctgcacgcacaaggagaaagtttcatgctctggctttttcctcagaatgtcagctgtccatttcagcgatgcgattgagtgtatgacgtactagcaaatggttcaagacatttaaagaaaatcagtcgtagtaaataagaattaagaaggatgtctacacaatgtgcgaaaacctaccgtctgatcaccaagcataagaacagttttgagagacaatttccgactgcagaatttgaataaatcctcaaggctagggccaagtaaatccatcatgagcacgttgtactctccttcaacaccataccatttcacatttggaatcccgtctgccaaatagaagatggcaaaccaaaaacatttaagctgagtgagtatcacaaaatcaacaacaaataaaaatttccaaaacatacaaattcatcaagacacgagagattacttcctccctgcagcattttatacagcttcgattcatacaacaattgaggatgcttggttttgacccttagatttcattaataaaacccattgcacagttggggaagggaaggggcgagaaactcaccgtcgtcgccggcgtcgcacaatgggggcaggaactgagggggtctcgatttgcgccgcacaattggggaagggctttgctgctgcggcgtttgaggctcactccggcagggaagggcgtggctgcggtggcgatttatgaatataatcaacacgaggctgagagaggaaatcaggaatcacaagagtgagagggccagagagaggtacctaatttttcggatttgggagatgaaggcactggcacagggctgagacgcgattcgtgagagaagctgagaagaggcactacactttagaaatagcattgcaaaaccagccacagccgtttttcaagtctctaaagtactctttagaagaggagaagggaaagaaaactcacctgcgccggtgaaccaaggaggagaacgcgagtgagagaggaacgcgagatggggatgtttggaggctagggttaaggttacaaaatggggattttcgacttttgttttttaaaaacgtgaatgcaaggaaatgggatttccgactgaggtaatggaaacatggccgtcggaaaggattaacatttccgacggatggaaggcggtgggaaaaagagggccggaaaatgccgcttttcttgtagtgtaagtaagcgtcgcctctcaatccaatttgtcagtatacaaaataaaccttccaccatagaatagagaagtctcttggtcccctcaatcatctttcccctgaacctacttaaactcccaattgagagcttctgaccggttcaattcaagggtgggtctacccattatggaaaggtcattaccctccctatccttttctttttcttgattccccattctacgaattcgttgttactaattcatcaaaggagcaaaagcttttggttttaagaaaagacatatagatcatccccacttctttgtaatcagatcttcaattcgccaattaatattatgatgaaagctcctgaactcaagtttttcatgttaaaaatgttttaaccttgattaaagttttttctatagacatgcatttccctgatttgagcatcaattgctttatacttatgaatgtttatcaccatttattaaatgttttgactcatttatgttaagaataatgagatatataactacgcgcttcttgcatagttgcatttgctgccacgaatgaagttatgtatagaaaataaataactttgttatttagcctttgcttaaatttcatagaacttcataatcaatctcattttgttaatttgacttaaagaaataagcttgttaattaataaagttcaggtaaattttccccaaataaattttggttgtaactaattttgggaatttcaccatcaataagaaattgggatatgaaaaacaaggataagggcaaggaaaaagttgtttaatttatgaatccgaattcaaaatcaagtgaaattagatcctaatattttaattttagtttttatttcccttttagtgtttatttaaattcttaaaaggaaaatatagaacagatttaatttcttcaattactttttttattagtaatattttagaaccgtcttcttcttatgaaaatgatattcaatttcagctagtgtcccagtaaagttatcggattattccctaagtcagtttccaggcctataattaagttaatatattctttaatattaatattatatgaaaccaagatcatgagataaaaaaaagttttccgtgtcaaatgttgcaaggtgaaaatgcgctatttttgttaaatataaaacctaaaaaagattaaaaaattcagtaagattttaaaataatgacatattttcaaagattaaaaattcatttaagtcattttctataatacaaatattcttctacaactaacagggagaatgacatgaacctaacttagcaaaccaggttttgctaaccttgttatagaatccccacaaacgttttccaagccgctagaggagggtcagattttttatttttttatttatcagcaaacaaagaatattatacaggaagagtaccggcagggttagatatgtgtcttagctagttattatatataaatgtctaagtcataattaattatgatagcttagctaactcttctattaactaatggctacacgtttgcagcttcatcattcatacaccaaaccacatgattaggaaataaccaaatagccttccaaaaccaacttctgggatataaacgaagaagaaaatacgtctatttagaattttggatatattcatttacttctctaaaaacactttaaaaaaataaaagtaatatattttacataaactaaaattaacttatgcacgaactaatttgtaaaaaaaacatgagtttttctaaaacgtgatttttaatttatgaaaacttattttattttatttttcttctaaaagtattttttggaaaaagttatccgaacataccttatactaaataaataagggattcttaactttgtactattgaaagtaattaaggagaatttctataataaaaaaagagtaaggagaatttcttactctttagcataaaaatgtagttaagacttaagagtgatacataaatgacccactagaaggctataaataaatgatccacgtgttggggtaaataaactataaatagcagcaaaggagacattataaataggggagtagtggaacagctcaacagcaggcaaaatacacacagtggtgtaatatgggtggggtacccctgatactctcttctatttatattttataatatagtgcacgttcaataagactgatagaatatgaaaatattcttgtaaatattttccatatctgtgtatatcttttatattaggttagttaatatccttagtcaaattagcctaatctgtagcctagatttgtgcacctaatctatagccttgatttgtgccagcacttatgtatattatgcagtattttgaatgaaacggcacggaacatattccttcatggtatcacgagaccaaggaaactttcctgtcttctcctcctaaccatctagcttttcttttcttctccatcttcttttttgcttctcgttagccatgtctgactccaagagcctcttccatccggctcttgctgtatccaatatcaagaaccatatctccattgttcttgaaatggaaaacgttcaatatggaacgtgggctgaactcttcaaaattcatgcccgatctcacaaggtcattcatcatatcataggcaacgtcacgaaggcacctgctaccgatgcagaaaaagaattatggtcgactcttgatgccacggttctccagtggatttattccactatttcgaatgatcttttgaccaccatccttgagcccgactccactgcaatggaggcgtgggatcggttacgcgatatttttcaagataaccaacactcgcgtgcggtcacgctcgagcaagaattatccaccactcgaatggaagattttccaaatgcatcagcatattgtcaacgactcaagatgctttcggatcaattgaaaaatgttggtgcacctgtttcaaatcagcggctcattcttcaaatggtgtctggactaactgatgcatataaaggggtaggtacgttactccgacaaagcaatcctctacctcctttctatcaagcgcgttccatgcttacactcgaagaggcgggtctgattaagatggcagccacgggatcgaatacggccatggttgcggcaacatctaaggatcttgatgagccctcctcttattctgaaaatttctcacacaatcgaggtgggaaaaagggtggaaatcggaacaacaaaaaccgaaataatggtggcggcggtggacgtggcagcggtaaaggcgcccgcggtggtggccgtggtagcggccagcaacaccagcagcagcatttcacggtccccccgtggcagcagcagcagggtccgtttcctggttgggggtggatgccacagccttgggttgtccccccctgcccatatccttcttcccaatgggctcgtccacatgggccagcaaaacaacaaggaattttgggccagcgtccacaagcctatgctaccagcaccccttcctctgcacctacagatattgaggcggctatgcatacaatgtcactcaacgttcctgatggaaattggtatatggatactggagcaacatctcatatgacggcgtctcaaggtactctctcgtcctattttaatatgagcaatctaaatcgtaatattattgttggtaatggacacggaattccaattcaaggttctggacaatcatctctttccccaccacatccaccattacatttaaacaatgtcctacatgctccaaaacttatcaaaaatttgatttctgtgcgtcgtctcaccactgacaataatgtttccattgaatttgatccctttggtttctctgtgaaggattttcagacggggatgccaataatgagatgtgatagcatcggggatctatatccaatcacctccaccaacagttctccaaccacctgtccatccacttttgcagctattactcccattttatggcacaatagattgggacacccaggaccatctgttttacactcccttagcaagaataaatttatttgctgtaaacatttatcctcctctactgtttgtgagtcttgtgtttttggaaaacatgtcaaatttccattttatgcttcatcttctaatactttgatgccatttgaaattatgcatagtgacttatggacatctcctattttaagcactgcagggcataaatattatattctctttttggataactattccaatttcttgtggacttttcccattagcaaaaaatcccaagcatactcaattttttcatccttcagtgcccttattaagacacaatttgagaagaatattaagtgctttcaatgtgacaatgggagagagttcaacaatgagcctttcaaaaaattttgcgataaacatggtcttatttttcgattttcatgccctcacacttctccacaaaatggaaaagccgaacgcaaaatacgaaccataaacaacataattcgcaccctccttgctcatgcttccatgccctcatcattttggcatcatgcacttgaaatggcaacatatcttttgaacattctcccaattaaatctcttaaccaccaatccccaactcaaatactataccttcgggatcctacttatacacatttacgagtttttggttgtttatgctatcctctcttcccttccactaccatacataaattacaacctcgttctaccccgtgtgtgtttttaggatacccatccaaacatagaggatataaatgttacgatttgtctagccgcaaagtaatcatttcgaggcatgtcatttttgatgagtcccaatttccttttgctaagctgcatacaccttcttccactacatatgattttttgaatgctgaattacacccctttttaacacatcaatggaacaatcaaatcctgcagccaacacagccacctttgcctactgctattcattccccagcaagccaggctgcccagccaacacctccaaggcctagcccaattcccatagctcctgtccaagctccaaccccaaacaatggcccaactaccaaccccctaccagcacccagacctgaacccataaggaccacgaccactagaagcatgcatggaattttcaaaccaaaacgttccttcaatctgacagcttcagttacccacattaccccatctcctcttcctaaaaacccaacactagccttgtccgacccgaattggaaatctgctatgcaagacgaatataatgctcttattaaaaataggacgtgggatttggtaccacgacctcctgatgttaatattattcgttctatgtggatttttcggcataaaacaaaatctgacggctcctttgagcggcataaggcccgtcttgtttgtgatggcaggtctcagaaggctggagtagactgtgatgaaaccttcagtcctgtggtgaaaccagcaacaattcgaactgttctcagcattgctttatctaaatcatggcccattcatcaattggatgtccaaaatgcttttctgcatggtaaactacatgagaccgtttatatgcatcagcctctgggatttagggatccagttcatcgagattatgtatgtcttttaagaaaatctctttatggtttgaaacaagcccctcgtgcttggtatcaacgatttgctgattttgtatcaaccattggtttctaccatagtaaatctgatcattcattatttatctatcgcaagggcaaagacatggcattcattctcttatatgttgatgatatcatccttactgcctcttctgatgatcttcgtaagtctataatgtcactccttgcttcagaatttgctatgaaagatttgggctttctcagctattttttgggcatagcagtaactagacatgcaggtggtttatttctttgccaacaaaaatatgctgcggagatcatagatagagccggcatgacctcttgtaaacctgctccaacaccagtggacactaaggccaagcttagtatttcctcaggttctccatatgaggatccaactcattatcgcagtttagcaggagcattgcagtatcttacttttacaagacccgatatatcatatgctgtacaacaggtatgtttacacatgcatgctccaaagactgaacatatgagtgctcttaaacgagttctgcgttatgtacaaggcaccctcacctttggcttacatttgtacaaatcatcaatttctagtctcatttcctacactgatgctgattggggtggatgtcctgacactagacggtccacttctggttattgtgtttttctcggagataatttgatctcatggtcctctaaacgacaacccactttgtctcgatcaagtgccgaagccgagtatagaggggttgcaaatgtcgtttctgagtcttgttggcttcgtaatctacttctggaacttcattgtccgatccacaaggctacattggtgtactgtgacaatgtgagtgcgatatatctctccggtaaccctgttcaacatcagcgcactaaacacattgagctagatatccattttgtacgtgagaaagttgctcatggacaagctcgtgtccttcatgttccctctcgctatcaaattgctgacattttcactaaaggacttccgcgcatactctttgatgattttcgagccagtctcagcgtacgagaacctcccgtttccactgcgggggtgtgatagaatatgaaaatattcttgtaaatattttccatatctgtgtatatcttttatattaggttagttaatatccttagtcaaattagcctaatctgtagcctagatttgtgcacctaatctatagccttgacttgtgccagcacttctgtatattatgcagtattttgaatgaaacggcacggaacatattccttcaaagacagaagctttctagctaggagtttctctgtaatctataattaactagaatggtgatatatatcacttttttggtgtaatctaaacaagccgtgtattctactgtcagaagaaatttatctgaaatcacacacttatcccaattctgttgtcatatatggagatcgaccctcaaatctgaatggtcccaactcaccatgttggttcatttgctttctccaatgaaaaattgatatttattattaaattaaatacttataatatactgcaactattcttatataatagattaaaaaaattatttatcaaagtaaaataattttccatagtctttttcacccccttagtttcttcaataaaaattatatgtctttaatttttacctatttgatttttctttaaattgtaaaactcacacaaatcattttctactttttttttccttctccctttcatgcatgcatggtgcgtcattcatagtgagagacacatggcttcaatcttttttagtttcaatatttcggcttttgtttaatttgagagagtttctacggttcccaaaaaattatgagagttttgacactgtttgtttttttaaccgataaaattattatgttatttgtcgtcttattaattaaatatttttttatttttttcaaattagttcttgattatttaaaatataaaattacaattattttaattaaaaatttgattaaatataaattagagtaactattacctcaagaaaaataaaattgtgattctgtattaatattggtgaaagagattaggattcatattttaaacttatgtttaatcaaatttttaaaatttaaaatagttttaattttgattttaaaaactaatttgaaaaaaacaaaaaaatctttaattaatgagaagatgtatgacatgataatttcgttggttaaaaaaataacaataccaaaaccctcacaattcttgaggcaccataaaaattctcttgatttgatccttcaataattaagatgtcaattcatttatacttttttttttcttctccttcttatcaattcgagtcattcatagagagagagacattagtttatttattttttcttaaaatttcagtattttgtattttgtttgatttgagtcgtttgaccctgtccaataatcataatgttcattattttttcattaataagttacaggacaaaaatcactcaaacaatttaacgtgtgattgcataggtaaccactaaccactacaaatattaaaagagtctcattaaataaaacataagaattgaaatttgtttatatttaatataaaaaataagagatttttattatttatatattcattgataaaaaaaagttacacaagaagcgtattaggctattaggtctgagggtataattaatagggcgagacgggaaggttgttttaactttgaacatgtgctttggtggtgcatgcatgcagctgcgctgtcacttgtctaactatatatattcaagattactagcagaatttatagcattggttctacttcacatgacaactacattagtactatttatattcaagattctactgtgtaaactatcctttagattgtgttttactgattttattcttggtctttttttttaaacaaaaaaacagacaaaaggtttcatccctcataattttttgtgatttttttccgttgaaattaaaatcaaattctaaaaagtttataataatttacgcactttattaaattaactaaactaaattccgttaataaaagatatgaataaataatatgcaaggcaagatccaatatactctctattaaatacattatcaattatgtatctattattttatatcttagtgaccaacttaatttgctgaaagtttgagtccgtaattaaaactatatacattcaaaaaaaaaattaaaattacatatgatatgaatgagcatttttaaattctaatgtataagaaagaaaattttattgctttaagaataaaaataatttttattaagatttgttaacaaattttataattttcaataaattttaaaaaattaaaaataatgtgtttaaaaactgtgttaaaaaatactaccaaacactaactagtcaaaaaatttatatgcactgtgaaagcttaatacatattagcatacatataaataaaacaaatattttataccattatttaacaatgaaatcttatgtattgtaagatagttaactttgtaatagtcattttaaaaattaatttgaaagtaatttttaattaactaataaatataaatagtgtataaaaactaaatttaaataaacttttcttttatcggattttatatataccatcatttcaggctgaataatgaacactgaagacttcatcaccacttttgtgttctgcatcagactttctagccaagtggcatgttgtatctgacaacgtaaccatgatagatatataagaccatcttcaatgtatattttaagagagtttcttagcaaatttgacatttttttttactttttttctctcctggagtgcttaaattttagttgagtttcttatataagaaactgtatcttaaaagaggatccaccaaaactcagtaaaaaatccatataagctcctaacattggaggtgccctaagctcatgtactatcttctaaccatggaatggggcgtcattcattgttacttgtaagggaccaaaccatgtccttaattatttttttaaaatattactatgtataattgttttaaattttatccatgaaataactttctttttagcctcctaattaaattttctccttctatcatagttttggccataagcgtaaactattcacttgatcactgaactgttatcattttaagtttgttctcataaaaaaaaaattgtgattttttagttcctacaaatgcataaaattttagttttgcttctatgtttcctgtcgttaacattggagaatactttaattttaaagtgatataaaattgttataaaaactttctgacggtgacaaattactaaaaaaatatttacgaaaaaaaacattttcatataaatactaaaactttttttgggtaagatataatgactagataatttatcataaagttcatgtcggctgagaaaaaaaattaatgttcatgtctttttcgttataaagattctcggttgacaaaagaatgatttttttttattcagttcattagctttgtaatctttcctcgggtttttagttctaggcttggccctccttaatcaacgaaaacaacgacggaagctgaacatagctatactgggccaaagcccaaaactaatatgataaacatgggatgttggttcatttcagattgagctttacaaaatgcaatgggacacagctggaaacaataatgagtataggaagttttagtcataaacatgttgttcaatgttttatctctagaaagcatcaggtcaagaaatgaggattcccatgatgatgaagaaagaaagaaaaaactcagatagccattggaaaagtaaagtaattgttaaatgtatccatcttattgttgctaaatgtatccctcctccttttttttttttttaataactttgcttatatacattttttttctacttttctccctcttttcaaatgtatctcaccttctttcttcctttggcttctccttacaaatactacctcttcattcctagtccattttctggctattactttattttctttctctatgccttcgatcgcttgagtcatcctcttccaacaatgctatttattcggttagcacaaactaccccttagctgtaaaagaacacattgaaagctcatattcttaatatgaaaggttatattatatagaaagatatttcatgttctgtttgaatcatgttcgtttctactaagtttagaaattaaattattaaagtggctgccagagattatcctttggtgtttgtggtaaggccatatttttttttgttcgatactgttgtttcaactatgaatttgtccttattattttgggattagacacatatacaaaacattataaaaggaatacatttgtaattttttattgcaaaagtagtcagagaagaggaaagaaaaacaaaggcattgtcaaagaatatgaaaggtaaagaactgaaagaaagaagcagaagtgtagaatatttgaatgggttaaaagagtaagaaaagggggaaatgatatttatgtaaaattactaacagaaaatgggaaagaggtatgtttaacaattgttgggagaaaaaaaaatatataattggaggctgataccatagttttgaagaccgatctgttgttggaagaaaaaaaaaaacacatttagaggctaataccatagttttgaaaaccggtcctttattggaaggaataaaaaacacaattggtggttgatactgatacaaaaattaatgtttaacaattggagggaactgcgaaatttgtgcagagataatgtcagaatataaaaaagaaataaacggaagataagaaacatctacaactaaaaatacggaaacagatcttaaacaacaatttcactatcctagataacagggctcttttctaaaagaaagataaatcttaaacaaaaaatcctaaatctttttttttttttgagatgaagaaaatcctaaatcataacagattacaaaaaattaaacaagttgactaaaaaagtaaagttttcattagttaggctgaattttgaatccaattttgaaaaacaattaaaaccaaatcaaaccgtacttatacatagtttgatatatcaatgaactttaccttgtttgtggaagacttgaaggtgtaacaccagtacaccacctttctctcttatctaaacataggacttactaatgataagttactataataccatagagttttttttaaaagcaatgttaaaccacacaatcaaccaaatgattggacttaaatgattaatgtactgaaattaagattgaattatttggataatatgtaagtttaatcattgacaaaaataaattttgattagattttagttatcttccaaccaaattttaaattaattaaagttcatttttataatgaatcaaaaggttaagacaaaaaaaattcccacaaccaaacataaagagtttcatttataaaactaactaggaccttagttgtataaataaaattttataaaattccattatcaatttatttattttctttataatttcattatctccattatcgttttattttttgctgacttgaatgtcttattacggtatcaatgttataatgattacaatgtacttgtaaacttattaaatattaactgaatgttttagaaataaaaatataaaaaccaaatcatttattcaatttaaaccgtaattcaattttataatttaattagataaaaaaacattatcagcaactttttgcataaaaattgattcaaatcaaattggggtttactatgttatctacacttatataatatttaggttcaaaattctgagtgtgtacgtacgtagcaggtccctctgtataattgttgtaggctccactattttaattttgttgaaagcttagatttaaaataaataaataaataaataatgtagcataattaacttaggatatggaaccataccctctctaccttgtgtctcacaaagcaaggcgatattgctttcagcgaaagtgttacatacaaaagataaatataaataaaatgaaacatccgttaagtatattttaggattagtcaattgttctcaacgttttgcatagatattttgggctcaggtggtggtgttattttgatttctctggtgtgatagaaacttagctgaacattgaaaaagactcggtagtcaataccttataacttctttttgctgctgaatcctagcatcaaaattggcatgcaatcacaaggttagattcctccttaactatgacatgttcgataatttaatgcatagatggactttgtaacttacccacagttatgaacctccacccccaccgtaaaaaaatgttggaaatctaatgcaacaacccagaaagaccataaacggtaccacttagttgcaatatcccttggacgacactgggatagcattgacttgtcttctccttaatgatttacacgagtgaaccccaccatctattaaaaagattcaaaccatccatacccctcctactcaatttaaaaccatcttgttatattatcccctacgatataattccattcaataatcattaacactaaagcaaaatgattcaatgaccaataaaatttacaggaaactgaataaatgaatccgattacttctttttccccttctctatcatacatattctcgtaaaataagagttctatgttacaaatcaaaattgtggtggagttgcaaagaccacattcacttgcaaattctcattctcaattaaaaagagcagctcagctctcagcaaaaaaagaaaaacaagttgcaaaatcttgtacctctcccctccccctctccacaacctgtacaaattctctgttgtctaaatgaattactatgatgcacaaggtgagagctgcacccccaatctggcagtaccaagcatgcaacttgtgacagatgttccctttccaatcagtaaaaaatcaagacaatcagttgcagcacgagtcaccatccaaacagtttaagatcaaggcaaccaatgagtcactcattatttgctgccagtgtgcaagcaacaaaagaatgcatcaagaaatttggaaacattttccagtccatgcttcagttcctcccacacggagtgtcaaaggagggttccttgtgcacacatcataattgtttgaagagcatcgtgtgacaattaaataatcaatcagtacggaatgacatatggaagagcaaaaacatctgctggctctatgtgcagagcttctgcccatacctgaggtgtctccccaacctctgaagatttcaccacagattttctttcttgcgaaacattgctgccaaatagccacgcttgatcgtcaaaatcagaccactgctccaccttaggtactgaatatacctggcctaggtacttggtatctggatgtggtggctttgcagttgcttcagttaccaaatcagctggcacattggcagtgtgagtcttgtttgaagaagctgcaaatggctgactttcaatgatgccattcatcttgctttctttctttactaccttaacactggtggcttctcgtggcctatctgaagcatttggaatggaaacttggcaaggttccaatacccttccgttttcagtgagtggatgagaggaagacaatttcggaaacttattgggcaaactgtcattgactgtaacaaaattaaaaaaaaaaaattataacctgtctattcaacagcaaaaaaatgcgtacaaacttgagaaaacttgtcaatatgactgaaaaataccaataattgaaatatcaatataagcatgtgacatcagggaaaacccaccgttatctcacaggacgtagtatctggtattagcttattaggtcagcaatatactagtccaaatccagtaagagaaacatcttattcttttttaaatacaacttaacaggatcattgagtagaaatgagaacaagactcatcataagtaacactcaccatgtggaactccatttgactcaatgtccttccgcttcttgagattttctccactgacagcgttcccatggctgttcctaaaaggctgtgtgaaagaatttgaatttataagtccaactttgttgctttcttttaatttattttgctctgttgttttaagttcattatgctccttagctttctcctcctttttcttctctttgtccctgtctttgtccttcccatgccctttcttctccttctctctatctttccttttatctcttcgtttatcatcttttttttctttaacctttttctttccttcatctttcttttccttaaccttcctttcttctgtcttttccttggccttttctctttcatctttcttttccttaaccttttctttaccttcaacagttgcttccaaattcctttcaaaatactttcccaaaagtttgggtattccaccaactccaggatgaaaatttccaacatgattctgaactggtggtgcatttccaattggccggacctcatcctgtattcctcgcccatcaatcttcttaacatgaagacccatatccttgagtttttcattaccatcagaccttgtgccacctggacctttagccaccaacctaacagtcccctcatcttttctatggtttgtattggtaaatttatgaacccattgattgtcagctcctccatcatcatccctaatcctccggtccaactccaggaggaactttgaatccttgctctcttcagccagatgatttttctctcttgccttctccccattgttaccagcatactgtttggtgagtctgttctcaaacaagatacccttcttatcatcttgcttaatttccttttgatggggtttacctccgttgagaccctcagcttgtcttgggaaccctttgtcatcagcagaactgcttttacttttatctctatctttgctcttgtccttgtctttatccttatctttctttttctctctgtgtttttcctttttgtccttcttttccttatgctttccatctcttccttctttctctctcttttccttgctctccctcttctctttgtccttcttatctttcttatgttttttttctttctgcttttcctgcaagtcatatggtgagaagagattttaagaataataatcaaataaggaataaaccaaaatggcttcaaaatctcttcacccaggagcaaccaaagagaaaaaaagaatatcaatagtaaaacatgcaaaaaagaaaaaaaggctcctgtctccttggcaatcatatatatccaaggaagaagccgcaacaataacaacaggatcaaagtccatcaatacacattgtctaccgacaaagtattctagattctaggagagcacatttcagccaactataaccatactaagagggaaaacacaaatccataaaagtcaaaaataaaagtatagcaattcaatttgatgccttattaaacattcccaatgattagattctttaaacccaacagaaacaatttcattcttatactgccggccattcagatccctattttctttcttttatggcttttggcacatattacaaataagatatgctacgacacttttaacggaagttctgtattctacgcctcacattgaaataaaaagatcaaaaaagtgcaactgacatgttttattaaggactagaaacaagaaactccacaaaataaaatatgcatttccagttataacccatagatgaacaaccaggaaacttcaatgataccaaggaaaatacccttctatgttcctatagttgaatcaaaatgaatgcaaaatagaacaaaccttgatcattttattcctgaaaaaaaaatgaaggcaaagaacaaacaacaaagccactgcttttgatcttctaattaacaagaagtaatccaatacatcatagtcaatacaatagtataccaaacaggaccaaagtcataactatactgagctccattaggatactccttgtagaggagcatcctaagcaaaacagatgagactctaggatcttcctcttgtgtgaaattatccccatttagtttttgaacacccattacaatgcagtgtcatgaaatgtttgaataaacagacgggattgatcacttgaactgatctgaccatgaaccatgtccgtaattcaaacactttcaaaaccttattaataagattttatacttaattaaagtttattttcttagaaattataattcatctaagatttttattatctttggttataagtgccctttagttgacttaacgttattttgaccttatgcatcattgtaatatagacacttcctgtcactagaacatatgaaaatctagtaaggacttagaagtactctgatgactcctctaaagagagaaagcaagagtctgtccacccttgatttgaaatggataattcaaatcacgagtggatacacattaactttctcattttacacctcactttaaaggagttaaaccccggctcatcactctacacagagtactctaggcttattaatctacaccaggtctcagtagctcaacctccaatttgattttaaaaacattgacatgattcaagaatatgctctagaggccaacccctacatggtggatttgatgaacttaatgttagcaacaaactgctaatcaacatcaacatcaaaagcacctttaatccaaattaattggggtcgatggtagatgaactcaataataaatacgagaaggttgaaaaaacaaagacggtaaaagtaaagaaggggaaaagaaggaaaggggagatgaagaacaaaggactaaaaagggataatctagaacatagagataacaacggatctaaccctccaccaagcttataacttttctccatttttcctaagacacaccgttccccaatctatatcacatttcattaaatcttgtttaactacctttttctagttacaatctacctctacctctctttgcgtcgagctcttgataacaaacttctgttcttacaggagcatccaagggcgtctcattatgtgtctcaatctatgttccttcatcttttcactcaccaatactactgttacctttcgtcgaatatcttcattttttatcttatccatcttcgtataaccacacattcaccttaatatcctcatttctgctatccttattttatgttcatgttgcctatatgctggccaacattcagttctatataacattgtcagtcatacagttgttctatataattttccttttagcataaaggaaattttacacaataactcagatgcactccgccatttcatctaccatgatataattttatgatttacatcctcatcaatctctccacctttgtgcaaaattgatcccaagtatctaaaaacatctttcttggatacctcttgaccaagtagatgcagggatcttgatcatcatctcttaccagtaaaaactcacatttcatatattcagtcttggtccagcttaacgtgagtcctttagactctaaagtgtttctccacaattcaagttttctattaacaccatcttagatctcatcagtaagcacaatatcatctgcaaaaagcatacaccacgacactttctcttgaatattttttgttagttcattcatcactaagaaaaagagataaggactaaaagtcgaaccttggtgtacacctaccgtgataagaaaataacttaaaatttcagtacaagctttcacacacatgatagccccatcatacatatccttaattgcatttacatattttaacagtacttttttcttctcaagagcccacataaaacttttattgagactctaccatatgctttctcaagatctataaacactatatgtaagtctttcttcttttctcgatacctttccattaattgttgcatcaagaaaataacttttatggtacatcttcctgacataaatcaaaattaatttacaaaaaccttggtctctctcctcaagtgatgttcaataactctctcccacaacttcatatatgactcataaacttaatgtctttataattagaacaattatgaataatcttccttatttttataaatagacacaagcatatttttcctccaagcatcagatagaatcttatttgtttgaagaacttattaaatagattggttaaccattttattgccacatcccccaggcctctccacacttcaggacgtcatcagatctcaaaactttattatttttcattctctttaaagtcttgttaacttcatatgtattaattttaagcacaaatcttctattcagatcatcataagcgtcatccaaatccacctcacttttattgtcatccacattaaaaagtttgtaaaaatagttcatccatcttccatttacatcttcatctgttaccaaaaaattttgattttcatccttcatgcatctaatttgggtgaggtctttactcttcttatccctcatttttgcaagtttgtatataactttttcaccatccttgctcccaagatttttatacaaatcggcaaaaaccttgcctctaacttcccacactgctttctttgcatttttcctcgctaatctaaacctttgcaagttctcatcattggaacttttatgcaaagatctaaagcattcctttttctgtttaattgtctcctgcacctctcctttccaccaccatgtttcctttgtaagaaatttgtttcctttgcttctcccgtcaccttccttcccacattttggatacatttaaccatcttatttcatatttcatttgctccccccataggctcctacagtccttcacacaacatgtttttcttgaactctatttgtttttcctcctttagcttccaccatcttatctttggggtttgaaccatcttcctcatattaagtactttattgaaccaaacctctagaactatcagcttatgttgcctagcggcacagtctacaatgtagaccttgtagtcgatacaagaatttctatcttatcgtctaaccataaagaaatcaatttggctacaattttggttactatgataggtgataagatgagactcccttttttggaaaaaggtgtcgcaaacatcaaattgtaggctagtgcaacgttcaagatatcttcttcagtctcacttcttgtcccatagtcaaaacctccacttcttttaccaacatgaccatttaggtcttctcctaggaaaattttctcctctcatggtatccctctcaaaacctccttcaagtcttcccaaaattagttcttatcatttgattgcagtccaacttgggttgcatacacactgaggatatttaaaattaaatcacccactacaagcttaatcagaataatcttgttgcctttccttttgacgtcaacgactttatctctgaaacttctatcgatcataatttcaataccatttcgactcttgtttatacctgtgtaccacaacttgaaactggtgtcatccactttcttgaccttttctccaacccacttaatttcttgcaagcaaacaatattcactttccttctggcaaaaacatcagctaactctttcagtttacccattaaggttcttatatttcagcttcccaattgcatccataacccttgggcggtattcacctaccaccctcgcccatctgcatgttgggaccctgacctacttatcaccaaatccgggttgaagacttgacgccttgccttgagacaaggaccctagctcagttatcactgcatcccgggaccgatgcagcgccttgccttgcggcaagggctctagcacatttttcgctacacccggaatccgatgtaacgcgtcactatgaagggtacactccaacaaaatatcattatgggtcatctcataaaaatagatgttttttttatggtcgattcgcaacacctgacaccaactctcttcctttatcctggcttgggacaggccatgcattcaaaaataattataatgcttagtaaaaggagagactttagaaaaagtaataggaaagactaaataaaactattgaaatgtaatcatttaaataaggaatgggttgcaactaaatgcagtcatgatctcccacatgcaaaatgtttaaaacttcattaaatccactttttgtatccattaaacaatcaattttatcaccaaaattttttatataagcattaaatcgatattgaaacaggatctgaacaaaatgggaacaaagcatagcaggtttggtctttgtaaatgaggagaaacttgcaattctccaaatattagaacgataaggaaaatatttgtaaaaagtgaaacactttaacctccataatccattctatttcaaaatgcatacaaatgtccctgcaatgtacacataccaacttgaaaactgcccacattatcttccctggattttcctcacttttttttcacaaacttcctatttacaatggtggttggttgaggtttcaataacaaaatgaagaaattacaaaaattagaaaaatagaggaccaattatcaaaccaaaatgctaaagtaattattatcatgcaataccttagtcatgcagtaattattatcaagcaattcatattatgtagttcaagttagttcctatcacgcaacatcttaaaggcttaatcatacttaaaactcccatcaactaaaaatataagctaacagcctgctccacaaaagtaaatctactgcataatgtactccctttaatgaatcatccaatgcaataaatctagctgatctacataacttcaacctctatactcaaacatccttatccaacataacagatgttgctttattattttctctttctcctcaaaattttcaaattccaaattccatcttataggaaagctcagctatctataagagatgctactgccaacggaatccaattaaaagttgaaacaaagaaatggtctaatagaaagaaacaaataaaaaattatcagaaaaagagatatggccactagccagtctctctagatagtcaaatatcaatgggttggtggaagtccagtccagcaaggaaaagagaggcattgtgggggaacaggagaaaaagcatggaccaaagagacagtcactacccatgaagaggcccaggggtcgctgctgaacacagagaagcatcacagacaaaaaaaaaaaaaaaaaaaaggggacaaggggagaaggggggatcacatcaatacacaatcagaaattttagggtacccattgtctttttatatagtaccacttcataaaacttgcaatacaatagtagagaagaagtatcttgagagcaccgtagctggctcactataaaaaactatgatcctgaattgacaagacaggataatcaataatgttatgacatggtaaaaacatacaccatatcaaccaaaaagaaaagctacactaacaattttgaatgtcacctaacaagaagaatgatacaagggaaagagttgactagcatcattgctagtcaaattgagaatttaatgcatatacttgacaaaacattaattagttcatttctttctaatataaaatcaacctgaagtagttgattgccatccataacttattatatgattatttcattagcaaatcatagttggccctgaaaatatataacttattaatctaatcaaggtaaacataacacgaactcaaggggcacataaattgatgtaaccagaagaatttatacaagaacattatacaaaatttcccaccttgatcaccacattgtagcaacctctagtttcaccacaaaataaacttgaacacttttacatgtttggggaaaataaactagcacaatttcactgaacttatagcggaaaatctgctaccattcaataaatggttcatgattgagtaaaatccattaaaatcacaggagaaaaaaggcaaaaaaaaaaaaaaaaaaaaactaatgttgagtaatagaatattttttccctttttctctttcttctttgaacagaaagaatgagaagtctactgaattgtgcagatagacagcttaaaacaaaagatttgaataaaaacagtataaaggagctcaaaaaaaggggaacaaaactcatgtttgattcaagaagtcatggtagccaataaaccagagattaaacagttaatatattttagatatatcaaaccctcaaaatttcctataagatcatctaagaagaatacaaccacaaaagccttttcccaatagttggaatctgctacaagaatcaaaccatgccattgtactacgtcaaaaacccagcttttgccaaggctatttttagatcatggtattttgtaatggttttacttaaattttccttggtaatcacaacaaagtatgttcaggtagaaaagccaaaacaagaaacaaaaatagtcagaattatttatacaaaaccatacacccaactatttacaatcaaatcaatgtgaattcttggtcttcatcttctcagtcgagtcagtcccacttgtgtaaaatcaataggttgggttgggccaagaatatctagaaccaattttcaccagtgtaattaacttaagagtatgcatctgattagcctcccattgagtatacaagcataatatatttaaccctggactgtccttattcttcacagctattatttcaacaaagacatagaactagcaatttcccacaacttgcttaagtcaatttgaaccccaaaaatgattataattcctataaccttactctaaatccattttagatgaagtgaaatgctttgttctatgactgacaagatcaaggatattcaaagatgttgcttccaaaaaaaaaaaaatcagtaagtattacaacgaatattagaagaatctccaaaacccaaatataaatggacaatctctactaatactaactttttgcttcaatacctaaggtgccaaggcataccatcaagcacaaagttcatcattttacaacaaaaggactcgtaaaaaaataatattgccaacaacaggcatagaacaagcagagcatatacacttttaatcatcataatatcccttcctcatcaccagcagtgttgttaaatagcggccatggaggaatggcgtggcagattttttgccaaccgccatattcaatttgtgaagggacgcccgccatggcagaccataaggcacaatggcgtgtttatatggcgggccattgataacactgatcacaccagtaatgacattatttctccactcaatcctcttgaaacttatatattcaggagtacatatcataacagtccaaaaatcaaaattttggacacaccaaaggaaacctaacatcttatagacatataagacagataaactccagcaaatcaagtgaaccaacttccatcaacaaagtgcagaacccctactaataactgtaggccaaaacagatactgtaatgtaactatgtaagcctccaatcatcttcaattgcacccatacagaataatatctgatactttcatgacttgtgatagttcaaaagatgccgattaaaatgtttcaagcaagaattttacaatgaacttcaaacaaattgaatttatattattaagaagaaacagatgaaaaattaaggagtacaaaattaattcaaacatgaatgaattcagcactttatatgttccattcagaaaatgacgtctatcaatatacatttaacgttatgcaattcacaaaaaactccattttgcatcacagttaaatctatgtcaaattatatgtacaatgtgagtgtaggaaaagtgtattaaccttttttaataagtccacttcatctgttatagccttctttctatatcctggtggtggaaatggaaaacagcgcgacattgcacaaaatccaaatacgcctagtgtaaaattcttctaaatttgagagtgcttgaattagtttccagtagccctgttccaaaaagggaacgaaccagcaactatgctcctgtccatgcaccatgtcactgcattcatttccagctttaatattcctccataagcctcttactacaaacacaaattgtggaaaccaccaaggtttactacccttcaccaaaatattcaaacagctcaaactatactactaaaaactgatgcaaaatcaacgcacagcacagcaaccacttgttctaactacttaaagtcggcaaatggttcaacacaattccaatcagtatatgtttcctacactagtgttaagctcagactaattatatcaattcaaagggctgcttcagaaactaaaaaggaccactgaaatcagatactctagtttccttgtgagccaactaagaatcaacagctttttctttgtgtcaaatccctaaaccaaaatgatcccccaacaaagacaaaaagacaaagaagaaaaacaccaaaaatgaagacccagaaggcccagctttttgtagtgtgtccagaaacggttctccaaatcctgatcactgattcactgttattaatatagacaatcttcttccatgttcaaagaagcaatgttaaacaccatcttaagcaatctccaagtgcaaatgctcaaccaccgtaactctaaatccaaaatatgaacccctgaaaagaccagagaccatgcccatttcacgcaaccccacgcagagaatgaacaagcacagtcttcctttcaatcacaccctccgatcaaaaccctaatcactcgggaaatttgcaatttggacaagtgccccccggttacgatccaatgaaaccctaaaaaaaacacaaacaagctgagtacacatacccggaaaatacccacaaagaatgaaaaccctaatcccaattccgaaaattttgttgattaaacacccaaaaaagagagagcataaagcagcaaaattgaagaggataaagagaatcaaacactttttgaaacctaagcaataatgggtatcgatcaaaagggggaaaagaagctctgattcgaagcgttgacgggaaaaaaaagtgaaacatcgattgatgaaggagagcccaagtgaaatttgttgcataagatcacctaatctgctacaaagcgaccatagtaggaggacaagatctctctctctctctctcatgaataaacagaagaaagagagaacaacaatctcatctcaatatacacaaaaatatgaatatgtatatctatatgtacatataataatataatatatggttttgggggaagtactttttctttgtgtgttctgtgtgttgttgttgttgctatggtatgctattcacaaagctagagccgttattgctctctagattctgggttttgtttctctttgtttaccactctgcttcttttcttttcttctatttctttctctctctggttatgcgtatttgtttgcctttctgtgcttaagttgtgtgttgtccctaatatatatctcatcattattggtcatgtgtttctttttcattatttttttttttttattttctcactttctctgttctttctctatattcctaagtaagggggctcatgtgctgtttttccgttcggaagtcacacgcgaggctgaaaaataattgaaaacccaaatgccgaaatcagaacaaaaaggaagggcaacaatggaatgccaagcaaagtcacgtgtttattgtccatcacacttgatgtatagttgtgaaatctgattggattattgacttgaaataatgaatcactaatttaatctgtggatcaataattgacccaatttaatcaggaacatattaaacattcaaaattatatatattatataaatatataactaatattatttgagtaaaaaaaattcatttatattccgaaattcaatttttttaaaaaaatcaaaatttttatatcaaaaattgtaaaattggtcgggtcgaaccgattcaaccaagatcaataaactaactgatcgagtttgaccggatcaactacataatcaatccaataatgaaatcggtccggttagaccaccggatcttggtccaacatgtccaaccgacctgaccggatcgaatttcacaacactggatgtatgtactagtgtatttaacatgtcaagtggataaggattccaatctcaaatccattggtatgaatattatttgtttgagatataatttcttaaatgaatattttttaatatagtaattagaactttttatttctcaattggatctggtatatttttacaagttttgattttttgagtcaattataggactaatcctagatgaaggatttagtcacacttaaaattcattatttccaagatgtatataatgtgaaaattgaatataaatcctcctcctgttgttaattgagttatattgattggatttatatgaaacttttaagagcacatttgctataagaattttttaaaaatttctaagaatttgaacttggagatgtttaatttttatgtttggtttactatttaaaaaataacattttcaataaacattgttttccaatgatgtttctacacaggttttccataaaattattttcatgggaaagttagaaaattaagggtatgtttggtttgagaaaatattatctttttttattttcttttttattttatgaaaattattttcattttcaaattttcatcatttagaaaaatatgtttgttggttttctttttcattttcattttcattttctgattttcttcaataattgttttccactcattacttagaaaatttatccaatggcattcactggatgggagagattgcaagttttgagtgcacggtcatgttattgttgactgttactaggttccaagagaaagaaagtatgatgcaaatgaaaagatctaaaaaatttcatgagtgtcatgcatgattagtgaaaatgcagaaaatgaatttttttcgttttcggaattttctaaaatactgaatttgttttctaaaatctactatacatatatgaaagcaataggcatatgtaattctgtttttgtccttttcagttgattgacacttggcaaaaatagggataaaaggataattgaacattaaaatgctaattgcacctcctttttaataaatgcatttcaatgtttccaaattaaaacttgctaactgcacaccctttttcataagtgtactccaatattttcaaattaagacttgctaattgcacctctttttgataagtaaattaatatttttttaaaattttaaatactcattatatcatttctttcatccctttcacacgttatctctttaacgcgtaaccagtggtatttcctatgtacttaaggtatcatactagccagttaaaacaaaatacaaaattccaatattattttaatttttctttcgaaaaaactctaaattttaaaaaagcaataggccatggaaatttcatttttgcccttatttaatttggtgacacctgtccttcttatctgataaaatggtaattttttaatatctatttaatgtacaccttcagccttcaactccatccgcttctctccgtctccttctagctttctttcaaaatttcaaattttgaaatttgaaatcacctccctctgtgcacacttccgctccatctctctctttctcttctccaccaaattcctcttctctgtttctctctttctcttcctccaatttctcctctcattttctcttttctcttatctttctatttcttgctcacctcactcctcttatctaaaatcctcaacaaaatatacgaagacagtccattcaccagctccgaggttgttttcatcctcctcaggtaactctcagcttgaatttgttcttcttcttcttggttttgattcacatgtctttgctcattttagagatgaaaggaacagttgatagatttaggtattaattgctttggtgctataagatcaacattttttttttaatgttgtaaggctcacaaagtatgagtttgagtcatgattattttccacaacttattatgataataacaataataataattagtggtcactttgttataaatgaagcatgatgtacatggaagttgagtaaaatttctgttttataagcttatacattaaacccagtaaagttccatgaggtgtttgacaaatgtgtggtgcttatgaagtgtttgacaaaatgcctcccccaaatttctattgctctgtttataatctttattgtttgacaaatttctattggtcattgcattaacaaggttgtgtttcttctctcacttttttctatttacaaggcaaagaaagactaaaggatgctcttgctgggttggtaattgcttttttttcgataaaaaaattgttgttatatctataaatgtttttttaagtttatttagagtggtcattttacgtgtggatatatttaatatattttaaatataaattataactaaagtggtccactaatatacaaatttagtgtattttagattgcgaaaaaataagagtgtatcaattaaattcatttatgttctaataagacacaaatattttgtaggtatctaactataattgaaaaatgacacaaatattttagttgactttgacatcaattcatgttaatgcagtattatatcatcaattttttaggaaaataggaagcagagcaacctcaaaaaattgatacattgaacatattgcctttttttatacatcgaacatattacttaaattgtggttgcgttttgtgactttccttgatagaacattaaaattttattggattttactgccaaatattttgatattggactaatgtatacattactctgtaagtttttttatggaattattttatttatattcatttgggtgatgcacgaatgcttattatattcaattattttatagaaactacttattttttaaagttttaagtgtgtgtttgaagtagaagtgatgtatagaaactgcttactttctgtttatttgttatgtcaacatattttatcatttttttgtaaatctcaatttctatttccttattatttgggattttcttttttgtttagataaaagaagattatgcgtagtaaaattagtctatgtgcttcgataaaattagataaaagaagatgatttgggattttcttatcagttcatgttaagataattttagattttcctgtgctttgataaaattagtctctatttaacatgatccttagtagccttggtttcaatttaattttgatttagaataagtttagataaggtcctatcaaaacttcttgattacatagtgagagtagaataattttttttttcatgttttgtgattactatatttcaggtagtaagggtttgaagtttcttggtttggtgtaagataaacagactattgttctagaaacccattacctcaattatgctaaatatccaaatgttggcacatatgatttaactttttttactagacaagtttagaattatctatgattattgtatgtatgccaaaattgacgggctattttatgttgaaaagttgcacttaggaggtcaggactgagaaagcctcatattccaatatgtatttaattggtttgtagaatatccatggtgatttagaattgaactcttaaaatgaccatgtagatactaataaaattgagcctacaagggctgaggaagaagcaattgctaaagggattgcaagagcctacaagggctgaggaagaaataattgctaaagggattacaagtataaagtactatcaaacatcttcagacttcacttttggaataattggtttaagttattatactagggaattgttatagcatttcagcttttggaatagttggttttaagttattatactagggaattgttatagcaggacatgagtcaatagaagcatgataaaaaaagcttgtgtaatgtcttctaagtagtgttagcagcagcaaagtggctctaagcaaattaaatattaatatattaaagaaagcattaagagggaaataatttactactaataaagctttcatgagtaaacctgaatatagaaaaaattataagaacaaaattctttaacatcattagacaagtttcatatacataatacacgaacacaatattatttacttttacttattatttttatatagaaaaatatcacaattgtcaaataattgagctacaataaactataataagagataaattcattgtcatcaatggatatattattttattgggtaagaactaaataaatgtataattttattttaaacgtcttcgatcatatatatatatatatatatatatataaagtttttgttaataaagtttttatattaaatgtagtatttgtttttgaatttttatcatataaaataatcgacaaatagcagtaaaataaaatggtgacatttaaaaaaaaattaaaaattatagttttattatttaaatttaatcaagatttaaaatttttaaactatttttatttaattcaattattacgataatcagcataaaacatttacttattatatttattagaaaataataatttaattctttattaaactaaagttaatcaagttaaattattttatcaataatatcacaaatatatatatttttttagttacaatagacataaaaattaaaattaatttataaaataagacggagtgtgacggggcgtagcgaaacgacccgtgcgtccgcacgggtccaaaaactagttgaaaatgaaaacatctaaccaaacatattttttcaattattttttattttcattgaaaatgaaaacaaaaaataataaaaacaaacagaccctaagtttcctatgctgaaaaaataattattgtgataaaaatatcatattatttttattatatcgtgataaataattaaagtttataaatttctattaaaaattaacgtgaaaatcttttgctcttaagaaatatatataaatattatataaaaaagaatctcaatcaaacatatttttcttatttttaagaattatgattctcataaattatatcaaacacaccctaagagattaagtgctaactctaatatgcgataccttgcattaaaaaaatgtcaagtaatagataatttttcatttatttgcctagtttataaattcgttagacaaaaatttacggttatatttggataaaagttgaaaacatgattttgatgattctaatgcacatttttacagttcaggtcacaaaataagaaaagaagaaaatgtcttttcggaaataaaagtatttttgagttctccaactaatatccagacatgtactataactataatttattctcttgttttttatttatattttattgagagtggattttgtttcgaggatttgtaagtttgatttgtatttcgatttcaaatctctatttatttccttcaaattcaaaatgatagtacgtgaactaatagtcaaatcctcttcatagctctcgtaagctagcaacatttaattagctttagtgaacaatttgtgtacagtacggtgatgaactctgtgtatactcaacagcatagctcaaacaagagcttggtatataattagactagctagtattctccatgcagacacatgtcccatgttcgtgcacgtctaggcacaatctccacaatgaaaaacaggatcattcagcaaaggatggttaatgggaagaagtaacttctctctccctcaatacatatccaagaaacaaaaaggaaattacgtattcccttatccaaaacatataaatatcttcaacttaactgatttgattgttgaagtccttttaataggtattttattgcacaccaaagaaaaatataagagattatatcaataatattagacaaccgagaagatcagatttgttaacaagtgaacttgataagaataatatgtattatatataagtcaaaatattatattttttattcgattaagaccataattttttttcataagaattgaatataaataatgaaagtttatcacaaatcttgtaccttactcaactagctaataaacaagaatgaataaccaaatttgatttgattattagacaattaattttataaaattaataaaaataactttgaaggatcttgaataagtataaacttaccagcaaaacatttattcaatttatcctgaaatcaaatttgagatcaacttagtcaatttgacaaatgtatacatttaaaaattgactttttactatggttttaaaagtttttaacggtgatatgttactattatctttaaagtcgccgttataaaagttaatatttttggactaggggtgttcacggtacgggtcaccagtgaatccgaactgatctgaacagtttgggttgagtcatttatatatttgggtcaaaatcgaatcgaaccgatcaaaaccgttcatgcacgggttgggtcaagggtttagatttacagatccgttgatctgatgacccgatccgtgaacccgtaataataatataaattttattatttatatgtatatattaaaaattaaaaaataatttgataacaaaaaaaggtatgatattgtaaatgtttaagattacattcaaaaataagataagatattttttattgcattaaaaagtaggataaaatatttttaagattgcattgcataatataatagaatatctttaagattgcattggataatatgataggatatatttaggattgcattcaaaaattggttaaaatcatatatttaaattagtataaatagaaacatattttggtgttcatgtatgcattccattccaaataatattagagtattagagagtttatgtctgcatcattaagagaattgttgtgagatcatatagaagtgtttgacaagtttgattcttcaactctcaatcaggatttaaaggtatctatttgcttaaggaatataagcgtaaatgtactattttattgtattcttcttcttgactttggaaaaaaggtcgcaattgagaactaggataccaattttttctctattcttgatgaattgagacatgcgacttctggctgggaaactaggataccaatttggttgggaaacaatgatatcagtctatctctattcttagtaaattgagactagagttttttgatgggaaacaaggataccaaatgggataattgttgtgtaagggtagactaggaaactaggatactaagaactcttgtacacaaaattatcatagtagagttatccattggattgattatccaatttggaagtcgtgattttttacccgattgagtttttcacgttaaaattgattgtgtcttctttatctcttatttccatattattgcttctgctgttcaaatgaacaaggtccatgttacttcatttatatttttgtttatttgtttgattcagcaaatatggttgcaacaaaattggttataagaaagcttggtttataagaaataattatgattcagactattatagtaaatattgttcacaaatcttttgttttaatttatattataagtctattttataatattatgttgatggtattaaatgaatcaattttactacttttatacatttgataatattgtattaattgtatgagatatttgaaacaatcgtgatataaaataatagttataaaataaaattaaatgggtaatccgatgatccgaaccgaaccgaactattcatgaacgggttgggttgggttgggtttcaattttttttcctgaaaaccgaaccgaaccgaaccgaaccgatcaaatttgattgggttggatcctaaatttggccaaaaccgatccgaaccgacccgcgaacacccctattttggacgacaatttttaaactattagaagggtataatttttaagacagttttatcatgaaatcatcttagaaagtgttcttaaaaaaaggtatttataagacggttgttacaaaaaatcatctttaaaagtctacattttaagacgattttttatgagaattatcttataaattgttatctaaaaaaggatggatgcttctaagactatttatgggagaaaccgtattagaagatccaatttctaaaacgattttctcgagaaattgtctcagaacatttccatatttatgaaaatgaaaaatacattttagtcattttttatcaaaattatccatgcacatgacttgttaatgtcaaaaaatatttaaacaacatttagaaaatttgtataaattttaaaaataaaaaagaggcatgtgcaatttccttaatattatgtttggatgagggattttcaaattctaaagaatttgaaataccatatatttgaattgctcttatttaaaattatttaattttgtatatgatttgtttggataaatcaattcaaatttttaattatgatggaataattcaataccttcatatgtaacaatttaaaaataaatttataatttttcaagaatatgaagataaatacaaatttattttcttaaatagtgacaaaatggagatttactttttactatattcatccatcaaaatgaaaatcatatattttctaaaataagttttcataatagtttttcaaaaataaaaaaaaaataataaaaaaatttgataacctttctttcttggttcctccttccttataacctacaccaactcaccaatcaaaatcgtcatcactgactaccttcacgctgccacctccaatcagcattgccattgtcgcgtcccgccaccgacatcaccgtcattctctctctcctccgcgcgacatcactatttccctctcctctgtgtgcaacatacccatcgatctctctctccttcgcgtgtgacagtattgttgctgttctctattgttctcttttgtgtgtgataccactgtaactttcgttctctctctcctccgtgtgtgacatcactatcagcatcgttctctctctctcccccaaatgtggagtcactagacagagggtgagagttgagttagagtatctctggaaaaaatttcaaactctattttttgggagtattttaatgttgactgatttaatataattaaattgttagataaaaatacgcatttgaatttgcttttaaatgttttatacaaacaagtcaattccctcaaaagaatttaaattccctttacaaaatgaattatccgatttaaatatatcatccaaacacatattaaatttcatgaaaaatatgtataagttttataaaaagaaaaaatatgtattatattctcttatgagagagatgtataatttattttaaaattaattataaacatgaattaattttaaattcttgtccaacataaaattaaatatataaaaaatcatctaaatataattttagactcgaaataaattattatctaagattaaactaatcacactcccagagccagtaaagttagtctaacgtgaaaacacgcgccaagtgaagaagtgtattacagagttaagaagaaaaatgcatgaaaagccaagtcatgtgcattgcttggttcccattaccactgcgacaattccaggtggcgttaccccagcttgtcactactgctacctatccacatacgtgtcaaatttctagtgagacacgctttgtaaaatatttatattttattttattttattatcatttttcagtacttcacataacattataaattcaaaattttgtttcatcgttaattgttacatattctaaaagaaaacgtatctgttaatatttttaatttggattttttgtcttttcattaggacctgtgaatccaacacttggacttatcaatggaggaagctgattgagcggttgtttgtgtggacttacaagtgaaattttctcgagatgtcaatttttaacttctattatacagttgtatctgatcatcatcattttaatatctgaaatgaaaaccattattaattgaatctaaccgtggtttcaactttcaattaattaacggtgttaaactaatataatactacatgtttaagtgttgccttcaatacccatgatgtcctacactagtcagtttttagtcatatgaaattactccgctgatgccaaaattattgacaatgtagtttttttattacaaaattattgatggttttcaaattataaatactatttttatttttgaaattatggaaaaatattttgagacctcgtgctttgtgctcaaatgggtagtttagccaacttgttatgaaatcatcccgttaagacattcctcatgtagaactagctaactgtataaatcttcaaaagtcaagaatctctccatctcacgatcggaaagctcaagctgcatgcagtatctattgtgttcatcatgtcctaaaccattgaagaattatgttttaggttgttcatctcagtcaaaggatggtaacctctcataaggaaaatgaacatgaaaaacgtacgttgtcataaagcagctatatatatacaattaatcgttgtcactgaagcaactatatacatgtaacattcacacaccccctctcttttatatatgaggcaaaaaagcatgtaatgctataacccattgcagctcccatgttcaaaaaatccaacttagcttaaccagtggtagaagcccatcaattaattttcttgtccatttaagttactacaaatagttagaggaagcttccaaagttgaatcccaaaagggagtgttaatatagcttgcacgcattctcttgttcctgtatgaacaatcaaataaatccattcaaaagataaatgaatttaagataggtgggttggattgtacgagaccctaaccttaaccttgtagtacactaggatgagatgacttttttttagtggacaagagtcttgcacgtcctccataatttatccaacatttaaccatttatgttgatatactataggataaaggcataaagcacatataatcactttttggaaattatgattggattgaattaaaatctaacggggacgtacgccatgacccatgagaagttaatgggtagtggtgaacattctcattattcaagcacgacaattttgttcttttgtgtgcacgggtgtgtatatattcattttatatgcttagtttgttttatagtgatttcaactttcaagccactaaagctttgaaataaatgagaatggatttccttttaataaaattgcatgaggccaccgttggttcaaggaagaggttaccaaaagatgctgttggcctcctcttttttgcagggcctttattaatttttcgatcttactttccggtactgattatgaatttaaaaggaaatttttttattaaaaattatatgaaaactcatttaaaatttgtaggaaaatatatttctaggtatcctaataagaaaatccttttatctttttctttaggtcactggttaatatttatcttatttttttagtttaatatctctctcccctttctcaatatattcatgatacatcaagttaattaaatgagtagtgcttgtattctataagagagtaaaagagtaaattaaaaatatacaattatacatcaatgattaatattaaaaatttaataattacggcaccacttaaaataaaataacataacttttatttttttagttgtaatatttcatgatttgatttaatggtcaagatttttgttctcactcagttataataaaattccatgtcgatctctagataatattaaaatatttatattaaatatttataatgattattcttttttaataaaaataatttaaaatttattagtttttaattagtagatattaacatataaattacattttagatttatgataaataattcatattatgatataaaaaatttcttcaacggtttattaatattgtcttatctctttcaatccgttatttttatctttatttttaaattgaatttcaatatttttagaataaattattaatattaaaaataacattttattatcatttatcataaacttataatataatctatatgcttgaaaagatactagtaataaatttgtaatgtaactaattataatcaatgtaatttgtctaatctttacataattaagaggattaatgaaagaaagaacattttgatttttgttagagataatggtgtgaatcgatttttataacacttatttataatgtttaataagaattttctatttcggaaagtttctatcaagtcttttattttttaaaatgccataacacgattctttgtttatttattttttttaatgtgattctttcggttcaatttagcatgaaggcattaagtgaaaatttcaatagttttaatcaaattaaactataaaaaacagccactttatttcttattttgaaaaataaaactaaaccagcaccaacgacaccagacaagtgttttaagggtcaatacttcatctatggtatatgatttatgatggaacatttgagaggtgaatgtttttatgaataaacaagtgtttgctaaggcatttacatctagatgcgaaaattgtttgcgagtaaattcaatagggagtgaaacttctttttactcttttccttaacaagcatatgtagatgcaaatatttttaatttccgcctctctgattttcttgattttgacatgcaaatctacaattttagtataattttttatttttttaaaacatgataaatataatgccgattaaatattcatacattaaaactcatcaaaaattgtaacttaacatctcatcctgaattgacccataagaataatataaaagtatttttaaataataaaatatcacattgagacatcatttaaaaaaataaagaacttaacggaggcttttgaaaataaaatggcttaattaagcattctaaataattgatcatttattgcttatttaaataagtaaatttattaagataaacctttttttatctttgaataagcaatttgaaagacaaaaaattataaaaagttcaactgaatatcaaattatattggaaatgataagattttcatagtaaaggttttcaactgaatatcaaattaaaaaaatttcaactgaatatcaaatttcaactgactttcaactgaatatcaaattgaaaaaaattattaagtttgcatattaaattcaaaaaagttttaaaatgataagattttcataggaaatattttcaaattcaaagaagatttataatttatttattattttggaaagcttcaatcgtcctttattttttaaaatgccataacacaattctttaattttaaatttttttttttttttaaagaaccgccactttgcgccgccaaattttcaaagaaaccagcgtcagggcgttgaataagaagcccgtgtcaacgaaaagaaaggcattgacttgaaagtttgaaacttcaactctgaaaacgaaagaagaaaacaatgtctgggtttgatgactacactcgcttatttgatttcgagaccgagccgtggcagaccctctatgactggtcgacgcggaaccttgctactccggttcctcccatgtcgctggcggaggacacccaacaccacgtgaaccagactgtctcggctccggtcgagttgcccagccacccagttgaggcgctggtgcataacggtggtggtggttccatgatgcagaatgctgcaggttcatcggttcggcgcaagagagggagaggggaggcatggactgaagaagaacacatgtagacttttaacgttgtattattttaatgcagtaaatgaatgaaaacttatcaaattctcatctcatatttgtttttttaatggcaggtcttttttagttggactccaaaaatatgggaagggacaatggacaaaaatttcaagccttgtgaaaacaaaatctcctattcaaatcgctagtcacgctcaaaaatactttcttcgccaaaatgcctcactcacacagaaaaaaagaaagagcattcatgacatatccttacattataaaattggagttccttacatcattgatttacaaaattcaatttctcttcctgaaattcgacaagttcacgaaatgcaacaaaaacaacaaatgttgccgctgaatccacaaaacagcttgactcatcaaatgaggggatttgaaaattctgatagtgcatatcaacaagttcatggaatgcaaaaaattcaagaacaggtgaatgaaatacaacaacagctgaaattgattctgcagcaattttcaggggatccatcaaacaacacgactccttagaaatgagtggatttgaatattgtgatgacgagacattgtataaaacaattttctttggttgagtttagatgctaatgttatgggagattaatcttatttatatctttgtattttaaatttgtttgttatgtattttaaatataggcaagttgttagtttgttacacttaatcttatctagttgttttggtttcatcttatctagtttgttatactttgtaacctattagttcaaagttttattatcaataatatcaattcacacattcttctgtaaaatattttcttaacctatcttcttaatagctaatgctttattaaagatatttcttgacataatacaaagttgttttgccgccattctatttttggaatttcatcatggatatgattctttaatggtagcagatattgtagtctgttttaatgttcaagagtcatgatttttttttctttctcgaggtcataatgtataatttgagttgtgattggttcatatcacttgtttttagaggcagcattttgaagtgggatataagcattaaaagatgtgagatctcatgtttgtccttaacggaagttgtggtctgttttaatatgaggagtcattaattttctttcttgaggtcatgatgtataatttgagcctgtgtatccaagtgactggttcatttctcttgtttttagaggcagaattttgaagtgtgctaagcattaaaagatgtgagatctcatgcctgtccttaaccgaagttgtggtcctattttaatagtatgaacatattcgtttggtttggttatgttgtatagaaactgttatccatgatcgggttaccggcaatgagaagcatgcaagttcaacacaagaaaggaacattaggagagaaagggatgtgagaaatgtaaaaatgaaaatgttaaagttgcatgtgcctacacaagaaagaatattatattgccacatattatatgaaaatgtgaaagttgggctggtctgtacggtggagttcggagaatgggctttcattattgagcccatagacggaactggaggaggcccaaacgatggagggatggggattggagtttttggaagcttctagaatggagacgaagacggggattgggggttctgcatggcgtagcggacgcccgcttgtgctgcgaggtggaggacgggggagagaaacgacgtcgaagagcttggcgagcaacggcgcgtcgagagcaggttcatgtttcctcacatttttgtttttggtttgctaggtgttaattaccctttctttaatcattgatatatatatatatatatatatatatatatatatatatatatttattttgttttaatttgatcaggtgcgggagggcatgcatatatatatgaaccttggaagtggtttggaatgatctctagtgtgtgatttttaaaaattattttggttctgcatttactaaattataatatatcatgtagcattttacctgcaaaacacatttgacaaggcctaatcataagctacctatttttatttaaaggggatttcttgtgaccaattgtattgcatgtttgatctaattcatctttaattgtctgtttgtatttattgtattacttcatgatatatggttttttctgttgtgttgaaaaggcgtctcatttgttgtctttatcagctaatttgacattttacaattaggattataatggagggtgaaaaaagataaagtgatgcagaataatttctatcacatttcaagtctagtggactaccaaaatttcttgaacccaactgatttaagtttaattcttctaagacaaaattatttttattacttttaattttaagttctactactttgacaatgtttcctttgactttggattcaaatgtcttagtacatacatataaatttcatagatataaattttgtgctacatataaatttcatagagcaaattttcaattaactctcagtactctgtaactataaataactaatttgctaatgtccccgacaatcttatgaaaatttcatcaactaattctatatgtatgctttcatttttgtagtgattgttggagaagtagccaattttgcagcttatgcatttgctcctgcactacttgtaactcctttgggagctttaagtatcattttcaggtaaggaacatggtattcttcataacattaattattaggatgtttctgctttctttgacacaaatgtggatgcacatcttcatccattaaattttaatttggatgcggcttgcattttggaaagttacaaactaatatcatgatgcagtgcaatattagctcactttatcttaaaagagaggttgcacatatttgatgtgctctttgtatggtgggatctacaaatattgtgttgcatgctccccatgtaagagttattgactctgttaaagaagtgtggcaacttgctacagaaccaggtaattttcaattcctgattgtttggtttcaacatatcttttaccattgaatcttgtaaaaaatcaaagtaggaggatacaagatgagtgggatgcatattaagatcttaatagattcaaggcattcatttatggttaatgaaactgacattgagttctttccttcatcaacaggctttctaatctacatgtgtatagttgtggttggtttgcatccttattttctattgtgttctcgatatgggccaacctatctggttatatatgtcggaatatgctctctcacaggctcaattacggtatatcgattatgtgttcagtgctcatatgtgtcatgtaggtcacaataaaactaccctctataaacctaatgttgttccttgttgcataggtcgtgagtgttaaagcagtgtcaatagctatgaagttaacatttgaaggcaacaaccaattcatttactttcagacctggttctttatgattattgtaataggatgttgtcttttgcagattaactacttgaacaaggtaaactttgacttacttatattagtacatttactgttggcagtcattgtaatttgtcttccaaagtacaacttaaaataattatgtcaaagttaaatatatttttaattttttttattggttattggagtgctaatgttgaaaacagtattttgatttttctgaccttagtgattaggtggtaatttgtaatgctcaagaaatttaactatgcttttgcaatctttgagacttctatcattatctaaatgaccatgtttgcatttctaatctagttcgtggcatttggaaaagttataaacaaaagattttgtattgcttttcttaattggcattgagctatttcatttcctttcctttgccgttatacatgagtaatacgtaacatgcaatatttcagaaatggcatgccatattttttacagtagggatttccaactaacttacaattgaacttcattttagtattggtttttagactttctttaataaataaaaccaataatgttagaatcattcaaataagtgtgccgggttagttgtttaagacaatatgcttatcagctaccaattatattgtaatgctattttatttattttggaatcatgtttcaggctttggacacctttaaaactgcagttgtatcaccaatttactatgtcatgtttacatcattcaccatctttgccagcataatcatgtttaaggtaactaattgccttctatgattccatatatatatatatatatatatatatatatatatatatatatatatatatacttttgtttaaaatgtacctgatgatgctactaaattatgcaatcatatagtagtttaaaacaataacaacaacaaaagcctgtttccactaggtggaatcagttacatgaatcaaaagatatcatcgtgttttgtcaaaaaaccaattcttcaaaaatgctatttaggatctaaatcgtttttcatatatttttacttgaagtttttattagtattcctctacatagttttaactattggcgatcacttatcaactcttcatatagacatatggttgtttatggaaataaaacacaaactaccttttttgaagaacttggacacctaagatctattaaatcagacaaactgaatttaagattatatcatataattttggcatattattgaaaacatattccttaaaatgtcctcaatgtgtaatttcatattttgttttaaaagcatgcatgtttgtttgctagtacttagtacttgaaaattctaacacatagagtttattttgtttatttgttatcgttctattttattatttcaaggaattttttttcccaaaaagtacgttgcacacctaaaagtacttttgctgttgattttcactttcaaaatctgcatcgatggtaacgatagtcagtcacttttccatattcaaacaatttccaccgaaaaaatcaaatagttttgtcattttagagcagcattatattacgtactattatataattaaagtgaaagtctattctcattaatttcataaataaatgtaaaattatctaaataatatatcgtgcttcaccagttcagtgccgcaacccccactaacacaccatgtgattggattataaagatacatatatagcattgttgttattcttttcatttgccagtacctcaaagaatgaggaacataacataatttgataattatgtaatttgcatcagatgcgagggcaaactattctcatttctcaatttgctgtgagagaaaatcgggtcgctgtcctccaattttttccccacattcctgccattttctgctttaacccaagaaattaaaagcgaaagagagtgaatcaccaataaataaataaattaactaacaaaaaaaatatatttgtccatagtccctaccgacataacagaactcaaaaaacggcgttaaacttttaattacaatagttggtttctacttaggtttcagacaaatagattgttttcaaaagacagagaaagttacgtgatatactttggtgccactcgtgcatagattctttacaaaatctctttttttgttacttataggcatgaatttcttaaacttaacaatacatgcatctagtgaatacagagaaatttatggtggtgataaacaagttctcttaattataaatcaataaacaatacttagtatagattaaataacaatctaatagtagtaaaaattcaaagatagttactaaaaaacgtagcacgcatcgtataattaagaatgagttgaattaaattgctatcttgttaattaaactcaatttatatgtaaatgatataaaaaaaatccatagatcacatataaacccgacaagaataaaataaaattacagtacctcataattttgtgatctaaaaatatccctatggctaaaagctatatcatacagaaatagggatggatatttgtcactttcttctttttggaaattattttattccatctcaagttttggcaggagtttccagtgcgtaataaatattgtgacagaaatcttgatacataaataagtgtgttttagtttagatatcataataaattattaaaatgatttactttaatttaatttttgaaatatgaaatgaaataaagtagaatttatttttatctagtaataaataaaaacaagcaaatatgataaaataaaatatagctaaattaaaagttattttttgacataatttccatggaaataattattaaaattaaataatgctcctaagaaaattaaataattattaaagtcaattagttatagacaaaagaagatacgtatacaacatagaaagtgagtcgttgataaggaatggaggataatgataattaagagacttgtgagacacatattgtcattgtaattaatatcattaattttaattaaattagttttagtaactgaggattattcagagatcataattaattacatctatcatgcataaaggaagtacaaccgggaagtggatgatgcaaaggtggggctataataatggacccaaccatgtggtgtggtgtatatatatatatatatatatatatatatatatatatatatatatatatatatatatactgtatcattgctcttttacagtagtcgaagatcccgggaagggaaatgcacaagaagttccctatcccatagcccataggcacagggtgcctttacaaaaggagattgtggttgttgatatgtccctcctttgtaatagttatttataatttagatatatacagtacattataatagtagtaacaaagtgttcaagtagatgatatgaattaagataagaaaaacaaatataacagggagatctcaacacagttttattatttgagataaacgtttataaatgaatatggaaataagaagaagaaaaacagaaataaattttttaatattttatggacttatattagtttatttggttttatgaataaagtaaaaaaagttaattaagttgagacgttatatttatatatgtgatctatttattaataaaaaaaatattactacgtaagcttctccattgaactaattcttgactatatgcattggtgatcgctcatatatagatgactaaacttttagcaaaaccgaaataatctattttttaaaagtttatatgtgtgttcttctattttctttgatcttaatttttctaggacgctacctgtattcagcccttgtattgagataaacaaaaagtatatttccaaacaaaatagatcgacttctaatctataaagataatttgtaataatcttattcttgagaaattattagataatttaggatcatcatttaattagttcataatcatgattaatttctatatgacacttaattaaatattactgattattttttcttaaattcgaaaaattaaatacatgttatatgaatataaatattgattgagaccataaataaataataatttaaaattatctaataatttttctcacatatgcgctgcacacaacaatttgaaaatttaactagataatcaacatgtgtcattctcgaacgacttagcttaaatttatatatatgtcagaatatcaagcattttcttgctatacagtgggttgaatttatagaatttagaatatgtgattttgaagcatgctagagcttactagctattaattcacacataaatatttttctttttccttctggcatattaaaaggtccatatacaagaaacttagatttgaatcctctataattgaactctttaaagatattaaaaaacaatcaattttcaaacttcacctaactgctttaattggtagaggagattaatttgttccttggacgcatgtgttgtttaaagacaacatgtgattctaatccttctttttatttgtcacatgtgagttgtgctgaaaaattatatttatacaataaattaacttatgcaacttttatttataaataaaagagagaaataagaaatgaagagacaataaaaaaatgagataagtgatagagagaaaagaaaacgttgtataattttttacctttggcggctgataataaaaaaattatttagttttcttgtatgaatacaatttttcactggactttcatacaattcaactatagatgatcaagatcttacaaacaacatgtcactttaggaaaaacagtgtaaactaacatgtttgaaaatgaataatttcacgaaggatttttttttaaaaatctcatgaaattgacaaaaaaaatggttatttttaaaataaatcaagctaaatatgtaaaaaaaaaatgaaaagattgacaagaagagaaaaaaatggaccaattaagtaaagtttaccacgagctcattgtcattagaaacagttagtttaccacctcaagctttaatttggggaagaaaacaggaattcaagtaatgcataaagatgttaaaaattagatactcatgaattagaataataattctttatttatttataattttattcattcactttatacttattttatctcttaaataaaatatatttatacaaataacattaacaatatgttgatatttaagatattgattttaatgtcaaatatttaattcttcgagataagatcctgaaagctagaataaattaaagcccaaaaatcaaccaaagtgggatgcgttttgttctttagttgacaatatgttccacaattagtggggtaaagtttatatacaagtcaaaccaaaataaggaaagtttatgcaaactgaggaccagaggaataaaacattgaagctagagaaaacaattccttttcgtcctctttcttctttcacaacatacccgaaatggaaatgaaaacattactcaaaatcatattgaaatgaaagacaaatgtggcatttccatcgtgaagaatatcatttccctcacagacacctcatgtataggttgcagcatgcaatggaatatggatgaaaacaacaagtacgtgtgtgagttgaacttgaactagggttgttatttactcgtcatgcacaagcaaaactgaaaatcccacgtaatgttatattaatcaataaataccttacaacggtggggtaggctaggttgctttctaattttgcatataaccattattcacatttgctttttcaaaatctagggctagcaaggaataaagatatggtcgttgctcggtagatccatgagaattgactttactacccatttgagactaagacagaagaagacatatggttctcctcacaactacgtcgtcctcttcatacacatatctatataattaatatatttcaaacaacatgcatgcctttctttcagagcaacaaagtcatacttttggcctttcaccatcccgtggccaatggggtttagtactaccgacaatccacacactatgaatgttctgcttggcccttcatgcatttgctcacatcatgtttaatcaattctttttctggtgcaaaatttctgtagggaccactttattgcaaataataatatacttcctctatattttatacatatgtttaaccgttgtagcaaaattatttcctattataatttcaaaataattgtatatccttgtctttatagggtgtgatatttggagttaagtgtgtgtttgggatttcgagggaaagaaataggaagagatcaagggaaaaatatgggtaagaaaatgaagaataaaactggaatataatcaattagtttataaagaaaataaaatgaagaattaattgagttataaaatacgtaacaataatatcttttttaaaaaggactaacaataatttattggtcggttatatgttaaatgggcaaagccgaaaaccaaggctcatatgtacccataacccatgccacctctaaaatcaaccaaaagctgacaatcattttataaagatggataggtatatataatttaagcaagaaaaaaaaatcaagatgatgttgattaatatgccaaactttatgaagaattaattttgttggaaatttttatttatctatttatatattataaattagaatacacaacttaatgagtgatattttttttccattctcttaattagacattttcaatatttcctctattcttcggtctaaatgtgcattccacactctactcctacattttgttaagaaaatctctcaatcatctcaaattatattattttatccttatttgtatgtttaatatttttttgttattttctatccttttaattacacttcttattatttaatatagtattttattgattttttataagaaaatactagtttgttttaacctatttcatttattagacttttgattattcaatgtgattaacttgtgtttattatatgttgtagtgatttagtgattaaacatcattgaaattgcaaggaataaaacaattcaaaaaaaatgggtaagatcttttttaaaaattagaaatgaagcaatgaacagtgtttgaaaatgtatatgatggttaaacttgtattttagaatagttttaggttgaatttatattataaacatgacaaatgttgaatttttttgtttaatgtaattaattaattggataatgtggtatcattttatttggtatttgaatttattgtttttgatcgataataatttgaatataattatatatgtttgttataaactgtctgagtttggttatgtttgaaaatacaaattggatttgttgtcaaaacaaaaccaacattgaaaaaagttgcacaaattacatgggctgccaaaaaatcgatgtagatctctatatccagaataattttctacaaaattgtctttataaagtgcattttttacattagttttaagcaaaattatcgtgaaaagagacattttacattgatttttctcaaaattatttttgaaaatgttgatattagatatttcttatacgatttttataatgattttggaaaaccatcatcaaaagccaatgacaattgtttaaacattgattgaaaaatcgtcattgaagtccttctaaaatcgttgttaaacttttttataatattgtattctaacatcttttatctttatgtcttgattaaatttcaatagattgtttttaacaaaattgtcaatggttattcattataaatctaagatataatttatatatatttcaaggtattcatttattataaatttaatcatgtaatgaatttaaaacaaacacttatcccaagcaacacacaaattaaaatgcttgctaaatattaagtataatgggattaacaaattctttctaccaaatttattcgtactcacttagactggatttgtatttttgcgtaaaagggatgaaaacccagtgcttacgaagtctaagctaagcccataaaatcagagaagaaacggcaacaaagcaacaaaagacagagaactgggctaatctgccagcagaagggagctgttagaatcggaccggtcatcgaagacattaattcaaggattaataattcaatcaaaatcaaattaggatcaaatagattttaatataataacttaataattttgaaaaaataataatatgcataaatcaataataataaaagtaaatttcatttaaaatgtcataagttataattttaaaaaaaaatgtcattttgaaagtttttattttaaaaaaaagtttaagtgaaacagattaatctatcgggttttataggttattactagtttttttattggttcaacagtttgcaccaatttaaaggagacaccaatttttaggaagttaaatcggacatgtgacttttaacttcttgcaagtatgattgaaaatgctggtcaactttaaaataataccaaggatatgtatctgagttaattgaggagcatatgagaatgttataaatcttaatataattttctatttttatggataaaaaaaatactaatttagagagtgaagagaaaaagaagattacaataagaaatatggcatgtgaagatggaggataaacataaataccatcctcttgtcgttgctactcttcagctttttgtgatttttctaattttagttcttgtattttacttaattttgatctatgtaagattttaatatttttttatttataactcccataactttgtgtttatagggaccaaaattaaaatatatatatatatatatataaagttatgtagactatagataaattaaatatcttacaagaattaaaatagaaaatgtctaagttattagatctgaaattagaaaaatgaatttaaagaaacaaaatagattattaatagatataaaaatatctgaaaagttataagagataaataaattataaataattacaaatagattatatctgtccgccggaggttttcgcaggcagcagtggccttttgccatccttttcgaagcataaatatggttatggctggcaacagtataccatatgctattttgattgcgatggaatctcatcacagcattatatacttatcgtcttctttcaataatgctttcatttttcttaattggttcttggttaaattgataatcacacttaaaaataattacacgaggccatttctgaagagtaattgatgttaaccttgacgtcccaacccaatgtgattattaagggtaacatacgccttgaacttacctgtttagtaactttttttatgatgtattatttcttaaaagaaatacatatactaagggacacgaatgatttaccttttttatagtttatttgttgtaaaatttgtataattattcatcaatatgctatctttatctttggcataagtttgaaaaacttatttctaagcattgatgaattacagtgaaatacgtttttatatttagctcgcaggaaagtacaaatatatgaattttatataaaaaatacaaattatctcaatccaatttttaaacttctatttctattttcacttcttttataattaaaattttaaaaatattaaattccagtcgaacctatttttaaatttaacgataaattcatagtagtcataatttttataactaattttattaatatttctacttcaattaactaaatacctttctgttagtaactttcagttacaattttttttttggatagaaattacatttttttgtacttaaagctaacttgtcaattttttgccaattacctatttcctcaatcctcgccttaattaattaacttgctacacactcactcggaataaataaacagtgcatttgttatttttcacaaacccgcaatagtccaaaagtgttatttctgtatggggtccaatttatataaagccaccttgttaatattatatttggtaattattagctgtcacgttggtgatttctcggatgtgcttagtttgagagagttttgatggctctctttatttaatcaaatgaaattataactaatgtatatttttattatttaaatataatggtaatgcaatatctctattttaaacactttaatgagagtgtgcttgtgtataatatttttaaggctaagaatataacattataaactctattattagtcagatacaaaaacagattaataccatgtaaaatttataaataaataaaaacttagctctgaagtacagtacaaattttaaaaaaaaagtattaaaaccacttagtgaactgaatctgatatggcaaacatagtacattaaatataatttcaacctaaggagcaaaggtgcaatgactatattttacaaggctgttattacctataaaaccaaaggttgtgtttctgttacattcaaaacaaggcaaaagcaaaggaggacttcaaagagaggaaaagcaatgaggccaccaagttcttccatccactttctcctccaaattcttcttgtctttctactgcacagacccagctttgcagtgaaaaaggtgagctattgcaatttgcaatcttgaaaaagataaataaaactgtggaaaaagatctaatgcttgcactgaaccatttaaattgtagtcatatgtggtgtacttgggagcccactcacacaagccagaattatcctcagttgacttcaatcaagtgacacagtcccaccatgagtttctgggatctttcttaggaaggtattaaaaaaaaaaatgcaattataacatcttaactcacatatggtacaatttattacctattgaaattgtttgagtttgcttattttttgtagttctaatacaaccaaggactccatcttttactcatacacaaggcacatcaatggttttgctgcaactttggaagaagaagtagctgctgagatatcaagtaagaaccaagaaccttatcctctgcttagttcctctgttttctcttctctgtgcttccttcatctcattgtgtacttatacccttttgtccatactgcttctagagcaccccaaagtgttgtcagtgttcgagaaccgtgggagaaagctacacaccactcgatcatgggatttcatggggctagagcataatggggtgatccaatccaactcaatctggaataaagccagatttggcgagggagtcatcattggaaacctggataccggtaagttttcctgatttatgtgtttaaaaactcttgctattcttttcaaagtggtcagcaacatcttggaattaacggggtttgattattattattattattattattattattatggtttaatctagatcgttgacttatacacacatgtggaacatactcaaagttatctcatcgtatctctatcccccaccaccaatctgtttccagagtttgatcgtttcaaaaaagttgatttcataacattagtttattattaatttgaatcttgccgtcaatgggttgttagactagtttttttccacacccaaagtatgaatgttcacgaaccatcttaaagaaatagactaattgcattattctcttgtgattagctataactacacttacatcatttttatatagtaattatactcaaagcataattaacactaaaatgaaatggacaaacatgacatgattaagtaaaataattttatcccttaaaaatatgatcaaaatcatatatgagaagaagtcaacttcttaaatgaattttaatattttaaaagattaattttcgattgagtgatatcttagatcatccaaaaaaatattatcatcaaaataaaacaagatgaaagtaattatttataaagaaattgaaaaacttcttatggtaaaattagtatgtatagaaaatgtttggtgataatggagtagtcgactttcagaatggaccacctttagaaaggcgacatgggcaattaggcatcttgtcatttgtctgttatatatattaggattagaattttgttacaattattggtttatactacaccattagatgttcattattttaaataatttaaaagttataaatatatgttttcagtctatgcatatgttgtgatgcagaaggttggtcataaatcatacttagattgagacaaaactataagttgtgacttctgttcattacgataggactaaaataaataaataaataaaaagggtgggcttataatgtgaggtggggctaagaatggtgccaaggtggggatagtccaaggaagtcataataagctcaccaataagaaaatcgataagtgcattacatgagcttcattttgaaaatgctcccaaactgtaagcatgaaaagtgggtgggggcaatgaaaactaaaaacaggaccatcatgatgctagcttttagccaatttggatgagattgagggagaaggggtagaaggaagtagaatctccgttttacaatatgcttatcttattttgaccacactcttctctcttttgctcccaccgcattaccgctaggtgtttggcctgaatcaaagagctttagtgaggaaggattgggaccaattccttcaaagtggagaggaatctgtgataacggaattgatcatacttttcactgcaacaggtaccatcttcctttgagtttgttgggatatttataaaaagaaaattcgaattaaagtatttaatattggatctcgttaacaagtctcctcagaatatattttttaaagaaaatatagttttaattcatcaaactattatttttattttaaaatatttattcaatgctaaatatattttgtaattataaagactttttaaaaaatcaaacgaaccaacattgaaaatttatggagatggataaattgaatgtaaacctggtcattacattcctgtcattttatatccaaggttttctttaaaaaaactcttaatctgaattcctctctccgtgtctagaacgatatggccttgttagaaaagaagaatattttgaaaaatattaataataaattattttcaacaaattatttattatttattaaaaatcatcaatttttctgaatctcacctctcattcagtattctctttcctaatttaataaattttaattaatatcatattgaatataagaagaaaaaaattccttatgtgtcaatatcaaatataaataaatctcagttattttatttaataagaatattaagaatgatttagaaacaaatattttaaataaaatttatataattaaatgatgtcgattaattttttattagaataattttttctcgttatatttaagattagattaaagaaagtaaaagaaggtgttataagaaaaagttatattagaaaatatgttattaacccttttctaaccatgaagtacaacaatctttggttgaatttaggatttatcttatttagtcaaccacttattgagggccactcttcatgaaaggattatgacattaacttcaaatgtgtacacactattcttgtttttttctccttatctatgttccttccattcatacacactctgaaggtcagcattttccatataacatgaggggccactcattcctcactcaagacaaacgccattaacaccaatttgaacacactaaacaatgcaggaaactaataggggcaaggtacttcaacaagggctacgcctcagtggcgggtcccctgaactcctcctttgactcgccacgtgacaacgagggccacgggacccacaccctatccacagctgccgggaacatggtcgcacgtgtcagcgtcttcggccagggccacggaacagccaagggtggctcaccaatggcacgtgtggcaacctacaaggtctgctggccccccgtcgccggcgacgagtgcttcgacgccgatatcttggcagccttcgacttcgccatccacgacggcgtcgatgtcctctccgtctcgctcggtggctctacctccacgcttttcaaggatagtgttgccattggttccttccatgccgccaaacatggcattgtggtggtttgctccgctggcaacactgggcctgcggatgccactgcggaaaatcttgcaccctggcatgttacggtagctgccagcaccatggatcgacagttccccacttacgttgtcctcggtaacaatatcaccttcaaggtttgtctctttcccacacacattttcttttatggaaattttgaaagagtttaactttatccaccgtgagtgtaatttttattttttacaatgtagttctatagtcccttaaatgtttataatacactaagttagtccttatttcactttatcatatcaagataatttgatgatatgtggcattgtaagagatttcatgtaaaataaaatgggcacttgtcatgtcagtcaaaattaatattattattgcaaaaaatgatggaaaaaactaatatgatctaggagatagctgactcaatattcttgtacattgcttgatttgaagggcgaaagcctatcagctacaatattggcacgcaagttctacccaattattaaagctacagatgctaaattggcgagtgcaagagctggagatgcgtaagtataaaaaaaaaaattgaaattcgttatagtcgtcagttgttgagtgatcatttggcataattaacatagtactagatatggtaaataaaatttatgtgcatgcagggtgctgtgccagaatgggaccctggatcccaacaaggtgaagggaaagatcgtggtatgtctccgaggaataaatgcaagagtggacaagggagagcaagcttttcttgctggtgctgtgggaatggtccttgctaatgacaagactactgggaatgaaattatagctgatcctcatgtccttcctgcttctcatatcaattttactgatggcagtgatgtctttaattacatcaactcaaccaagtaagatacttaccagtctagtcgaccacttattaatactaattcatgctatgccttaaagttatgcctactttggagtttgcactatactattgttattatacttacaatttatggtcaaataagtaaaggaagcaattctagtttttttgtgattgttattgtttgagctatataaagatcccgaaaggataatcatgaatttcagtttttcaacttgactacttgaaatttatatattgctaggttcccagtggcatatattacacatccaaagactcagttggatactaagccagccccgtttatggcagccttttcatcaaaaggaccaaatactatcgtgccagagatcctaaaggtgacattactcactagtgtaatttggcttgtaattttttgtaatgtgttagatatctaacaactcttaatttgtccaatatattcagcctgatatcactgcaccaggggtgtcagttatagcggcctatactgaagcccaaggaccaaccaatcaagtgttcgacaagcgcaggattccatttaactcagtttcaggcacatcaatgtcatgccctcacgtttctggcattgtgggactattgagagccttatatcctacgtggagtcctgctgctattaaatcagcaatcatgaccacgggtgagtgagattttcttcaagtttctcacgcttcaaatcctttttcttaagccaatctacaacaaaatgtcccagaaatataaagcttagatatatacatatagaaagtaacttagatatagtttttttaattcttctagtgttaataaaggttttcattaaaagattgtgcaaggtgaaactctaattcgaattagaaaacagcgattacagtacctaagaaactatatgtaagattatgaggggaggtgaaactccaattctaattggagaacgacaccaatagtatctaaggaactgtatctaagtttttgtccatacatatatagaaagcaactttgattggtgaggttaaagtggctatcaaaagttgattatttgtcctctgcaactttcagctacaacactagacaatgaggtggaaccactactgaatgctaccaatggcaaggcaacaccattcagttacggggcaggacatgttcaaccaaacagagcaatggatcccgggctagtttatgacacaacaattgatgattacctcaacttcttatgtgctttaggttacaatgcgacacagatctcagtgttcacagaaggtccatatcaatgccgcaagaaatttagtctcctcaacctgaactatccctcaatcacagtccccaaactctctgggtcagtgacagttacaaggagattgaaaaatgttggttctccagggacgtacattgctcatgttcaaaacccgcatggaatcaccatttctgtgaagccaagcatcttgaagttcaaaaatattggtgaagagaagagctttaaagtaaccttcaaggccatgcaaggaaaggccacaaaaaactacgtgtttggaaaactgatatggtcagatggcaagcattacgtcaagagtccaatagttgtgaaggccttcttaactagaaattgaattgatgcaatttagctcatttgcatttctaattgattggtagcctattctaaattgtatgatatatcttccaaactagggcttctttgagagttatctctgacattgattgataacaaagaaaccagcaagtggctttctttgggtgtacttttactatgattccaaggagaaataaaacctaacacgttcattctccttctagttataaaatctgggaagtttcttactctaatcatatttcaagccttacttgttggcattaagtttcttacatgacatgttaaaacctcatgttgtagtctatgatgtaagaatattggttcttatttcaatttgtattgagaatattgtacacataaagttttgactttgtagtaacgaagtgaggaactatgatatgaaatatttagtatgtaaaacgttgaatatatgatttgcgattgatttagatttgtttaaatgtgataatgtgtgggttgaacatgttgagtcaaattcctgagtacaatttgttttcaatgacaacaaacccctcaacaagataaaaaaattgcaaactttcttaacctgattattttgctaagcgagcagtatagtacagaaagacaaaccacctacggtgaaaatgcatcgagtgccttctgggtctgtagaagttcaattcaatctaattgattatatttactggactgatcctcctttttttcttcccagaactttttgtttccttaaatgatattttagtttttaattgtaattctggcaatgatagaaatcattagagataagatgtgtgttttaggacgctgattgagcaaacaaatcctacgcctctaatgagaggagaaacgagccctttagtggctgattcagattgcatcaagtaaattagttcaacaaccacaatgcaatagctgctcacttcattcctatgtacattttaatggcttttagcaggctttcttacattggatccattggcaatgagtacttgagcaaaaataagaaactagaggcagcagatatgggattgggaaaatttacaaaacgatgttggaagtatgttgaaaagtcacgctgtataattattaatgaatgtcttattaattttttgcttctacctattaactcttgatgcataatctcttgccaataggagcgtgaggaacttactacaccaagaagacgttgaagtgatgcatcaagaattgattcagtaattagacaatgaaaacacctcaataagaatttgagtttaagttacaaaagtctatctacaataggttacaggattacgttaactcataatctgccagagggggtattatcggtttatcaaaattagacacggagcattttggttttcaagggaggggggggaggcattggacattgaggcataagaaagacgatagatttatttggataatttttactttttttgcttaactcaactaaaactcatggttgttaagaattaagatgttctgttgagcaatattttgaagatgaaatcatgaaacatactactactagcttgcgaggaaaataaagaaagcaggtgtattatttcaattttaatatgaaaaaaaatatgatatcaatcaggctaacaaattaaacatgaaatcaaagacaaagcaacttcaaacttttgaattgaaacaccatcacgataaaccctactactcccagaaaggaagacacttatttcctttttctccatttctgccctttgcgccgaactttgagtaacataattcagtagagagcggtatgattgaacctaatccttgtacttcatttcagataccaggaagccaggcatgtcaaatgtggcagagaacttctcaacatcagctttgagatcttcaatggccttgttgttgacgaggcccttgttgaaatccttgagaagtttgccatgctccttctggatctccagtgtgagagtcacagcacggtgaaggaactcaccaatctgctcaaagtccttttcaaccaaacccctagaagtcatggcaggggcacctgttcacacaaactccagtcaggcactcacccatgataaacaaagcacagtcacacatttcactaacatcagagaaaaatacagaaacaggggcaataaaaaaaaaaaaaaaaagcatttttgtaattaatacatcaagataattaattcatttttagggataaatattaaaaacaaataacaaaaaaacatattagtttatagtaattgatttggcaatcatattgcacaatcaaacaactagaaactcaataataatggcagtctgcaagcttagcccgatctaatacaccattgttaaagcactagaaattaaaaacacatcctcaatgaaatttcttccaatactaatctacaacttaccaagataccttgtacaaatgcattaaaaaatccacaaaacttagatacaatcactttgtgttttaagcattgttctccaatcaaaattaaaatttcacttcgatatatcccagggctcaaccctggacaggatgtggaatatgctagcctttaatagaaacattattacttacattccaattctgataagaaaacagtacaaaatttcgtaagaaacttcattaagttctgtgataaaaaaaaaaaaaaaaaaatttgaggatatagtcctagccttaggaaatcattatttgatcttaaaaatgagatcttgttttgaattgagttagtaaagcaagatctgtattctagcacataaaagagaaataagttggttaccaattcgcactccaccgggggccaaggcactgctatcaccaaaaactgcgttcttattaacagtaatgttgcagagatcacagagtttctccaccttattccctgcaaagcaataaacacaagaaacgagtcagattcagattcagatacattggcaacaaatcgaaatcaaaatgcagcggtccaatcctatatatattaccagtcaatccaagaggtctgagatcccacaagacaagatggttctccgtgcctccagtgacaagactgtaccctttccccatcaagtaattcccaagcgcaacggcgttggccttaacctgcttggcgtaggccttaaacccgggcgacgaggcctgttttagcgccacggcaagagccccgatctggtggttgtggggcccaccctgcagcgaagggaacaccgcaaagttaatcttgtcctcgaaatcataaaccgcgttctccggctgccctttcttcggcggcttcgggcccttccggtaaaagatcatccccgcccgtggaccccgcaagctcttatgcgtggtggtggtcacaatgtcgcaatactcgaaggggctgttcacttcctgcgcggccacaaggccgctagtgtgcgccatgtcgcagagaagcaatgccccgcacttatccgcaatttccctgaagcgtttgtagtcccaatcgcgagggtaagcgctgccaccgcagattatcaattttggcctgaagtctagggctttttcctccaagcggtcgtagtcgatgtagccggtggtggagtttactttgtaagggaggctctcgaagtaaatggaggtggcggagatcttcttgccgccggaggtgtagtagccgtgggtgaggtggccgccggaggggagatccagccccatgatgcggtcgtgggggttgaggacggcggtgtaggcggcgaagttggccggggagccggagtagggctgcacattgacgccccaggattgggcgtcgaggtggaaggcctggagggcgcgtgagcggcagaggttttcgatctggtcgatgaattcgttgccgccgtagtagcggttgccgggcatgccctcggagtatttgttggtgagggcgctgccgagggcctcgatgactgcgaaggaggtgaagttctcggaggcgatgagctcaatgccgcggcattggcggtgcttctccttctcgatgaggtcgtggatctcgggatccaccgtcgccaagggcgtgttaccccacacgctcactggatccatgaatgttgaagatgaaatgagtgaagagagtgttgttgtgttggtctaagcctttgagctggaaggcgaatgtgagtgcccagtgcctatgtgtgcgtttttaaaagctttgcgaccgcctgtgaattgaccgttgtaccctgtgcttccggttggttaaattgtctccacttgttcgcctgctgctcgttacagacagagtagcttcttcctcttcctaaacttttgccgtgcctttttttagtaacttttttcccacttattacttaattgccttataatatttatattcatttatagtatgtttgaaaacatgcttcacaaccaataaatcacgtctttaatgtggaaaacgtaaaagcaaaaattacgaatatttatttttggtgtaaaaatttatgtcctagcttgttccaaacaggatattagagtgtcggttggacattagagactccaacgtgtgtcaatttcaaagcatgaagtacttgcttccacgtcattcacattttttaggtaaatttgcttgtagatgtgaataaaatcatgtcattattcgtaatgttctggtttttaatttaataacaacacatgaaacaacagagcagtttttaacaggacaagaacaaaacttattaatttatttataaggaaaaaaacagaaaagaacaccgatctcgaatagtgttattagtgggattctctttctgttgattaaaaagacaaacagtggctagtatttaaaaggtgtgctgcttgcactcacactcgtagatttagaagtctatctgttatcaaaccagtttagctttgattagctgatcaatcaagcatgggacgagttaaatttggaaaatgcttacattaaaatatatatcaaaggcttttcattcaaaaacaagcatcagcttcacttcttaaacttcaacataagttaaagcaagctaagaaatccaattgttcaacatttgactggaaacctgaaggcgatgccctcgtagcatatgtacattgtacgtcactgcaagatttggttttaggtttcattctcaattctgtgtaacgttggtagcaccgtggtaggtgggggcaatatagccaatttattcccaccaaaatcaccaaccctctctactgcactgatgcagacgctttccttccccgacaccttgcttcactaacatggggattgttaatttttaggtttctgaatatgactaggaactacgaaatattgtatttttcccccatccaataaattttgattgatgaaattgagcctcttaaataatactacaataggtctatgggattaattttgatttaacaatgaagtcaatgttcagcaggcatgcatattatgttgtgcatggtggctgattatcgcacgcgcagggggtaaattgacggatttgcattcaggaaagcctgcttagtttaagttcatggacataagtctttcatctcttgttaaatattttaatagtttatatcacaaaataatatataaaccaatgagtcaaaagtatactaattaatgtaaaattttgtcttttgtattacctatcataatacaacatattcagccaaaatcacatcacaacaacaacctcttgtgtcttcacccccataagtcaaaagatatttaattaagaacatcattagagataaaccagtggtaacttttactctgcaccctctaatgcacctttaacatgacttgatgtaacaagctttttatcctttaactttaattaatttagtttttatcttttattatatatatatatatatatatatatatatctttattattagcattttagttcacgtttccattttcacattttatacatgagctattttaaaatcctaccagcttctatcaaaacatttattattgtacactttacaggcataccagtttactaatattcaattcaatgtggtgaaattatttttaaaatgaagccttttaagccaccctactcagttctataatcatgagaaatctcgtagcatcgtcaagagatattgatatgttatcaataaaaaaataaattccaggatgaggaaaaaatctgcctaccaaaccacttgaacaaatgtacatttgtagattaagctgaaccactccaccaagtttgaattgccccaaactctaccaacatggccaagaaagtcgtaattcaaaatttctcatataaatgagatgcaactagttcactgactaggaagcattttagtttcttacttcataattccagaggttgatgtggtggttgacttaaatcgcccattggccattgtcaaagccatttgtaaagagtctttaaatcacgtatgttatttgcggttggcacgtcccaacttctaagtcctcaattacccacctgcagtttttaatttatgacttactttattatattcaataatgctctcataataattccgtgatatttttatttaattacaacgcaggacaaactgcatctacatctaggctatattaatattagcgtattaattgaggaaatacctaattttacgatctactcaagctatgccaaaaggttgttgatatactgtatttgttttaacttttaacattaatttggtcattgaattgttttacttcaataattacaaattagtaataatagttggaacggccatttgcatgtaaaaaagagagagagaagggcgagctatctgagttctatgatttgattttttttctctcttaaaaaatgtccctttttataaatagagaagccaaataaaaattaaataaatttctaacaataatttatacaattatcatagtaaaaagttgccaatatattttttgaagaaaaaatagtttgatgcatgtcgtcatcatgaagtaactattatgatcatttgaaaaaggtgatcacatctcagatagaggacacagaagcacatgatatttctttcttggatgcatgggtttttttttgttactggtcatattcttttaaattttaatatatgaacatgttcatgtttccagcagtactgtactttactttttaaaaagaattattaattattataattcgcaaatcttttagtcgtatattaattaatttcccgggatcgctcactcttttactaagaatgcgaatgtaatggaagggcactttttttctttttgttattttttattctcttttctttaaacaggaaccaaccgacacagttttttccaggtcttgacctgtacttgtgtggcaagctggtaacgcaaagctaatataaaaatgtccttaaaaaaagtaatataaaatggcttttaagatagttgaaaattaattaacaaagatattttttaactaattatgataatttcgtcattaaaaaaaattgaaatcccatttagaaataaagatacaaaagtgaagattaaacacattgattttttattggaatcaattttatttgagacgaacatgatttttatggatgaaaaaaactcttcataaatatcaaaacaatcgcattgttattacttgaattcaagattattggttaatctaaaataactctacatcagtttatttatccatacggtcaaaggtacaaggagatagtaagtgtaacattcaaatcgaatgacaccagaatgaaagggatgcaaaaattgtgcatgtatgagaatgtatgactgataataacttaaatgaattaattgatactacctctatcaacaagatacatatacttttcaatagttcattacttaagaacttcatagttaagtgtttgacttaaagtagttataagatgagtaatattttggaagcttccctgaaagcatatgagtgaggacaaaacatgctgaaaaatcttgtgttgatttgtgggatcagtcattgatcctgaaagcaggcagaatgatagtcaaagtctcgaaaatggctacctacagagagttctgattggtggaagattttgaccaacaaagatgttgaatgaagtgtcgtagtgtgagagccgccaagaaattgaaaatcaaagatattatagtacgcgtaagaggacgtcgaagagagaaagggagagacaagcaccctaaggctcataagcttcacaagcaccctccttagctcaacccaaccattaacgtttcttgagccatgcagctgatatctattaatataaaatgtcctcaaactagtcttgccatgtgtcccctcattattggttttaggggggacatgcacatgcgtatgtgatattgtcgattttatagcaagtatgaaggtgtataaatgcatcattgcaactaggaataaaaataggttaggtcaagctagactttgacaggtttgaacctagtctgtattattatcattaagtttaagtttgatttgttacatgttaaatataagttactaagacctaagtgtaacctgcataaaggtctgtcctagcctaaaaacctatatacaaaatctgattaaataaaaacaaataattaaaagtaaaaaataacataataaatatgtttctcttataagttataaattatcaaatataatcttataagttatagtttatatagacacattgttcagatttaattgatttttttgaaagcctatggcctaacctttttaattaaaaaggtttttaaaaagcttaaatttaaacattttaataaacaagttaggtcaaacaaaaccttaactagactagattgtagatccctgacaaactttctagtctatttcaattcctaatttacaactttttgatatgtcacgaaacgtaagtttcctgacatgagaccagatcctaatgatttagggaccatattaattgatagtatcatgttagtataaacataatcataagagatatttatatcatgaaaaccttctcactcgggtaaactagaagccaaccccctctgtcatgcctctcgcatcctcctttcaacacaaatatcactcaagtttgatgtacatagttggttggatgtaccaatgacaaatttaaagtatgtaaaattttaacaatttttttataaacaaaataaattagtctaagagtacctcgtatcaatgtatattttaattaaaatttgtaaacttaagtttaaattaaacttaaatttgtaaagtgtgtttgaaaaaatatcataagttttatttctttaaaacagtttttaaccaaattttactctaaaaacatattttccatgaatattttaatggaaaactaataatttccttagtaggtgaaaaagaatactatagaagatcaatgtgcagttgagttttataaaagctagggtgagtacagggcgagaccaacagttgcattttggtgcgattgcaacacgccgagtcgtgccaagattcggtaaaaatatcttctcaataattgtgattgtgcggtgccaatatttttggttaatggttggttccaaggccacatctaattaatctccataaccggggaccacagcttgattatttatgtatgctggtttttttcttttattttatcagaatgttttcagacatgcacattcactttccttgtgtcttccatttacgattcctagttttctttcattttcaaataatttacaagcaaatcaccgacgacagacaccgacacacgtatatatattcagggcgctggcggagggtgttgcttcagcttcactgatattatgatttggcaatccacaacgtagttaataggtcatacaccaatgaaaaatagcaattcagatacaactatggtgaccccatctcccttatactagtacattattaataccaagattttaggagttgactcttgcaatcatctttcatgcatcacatatattttttttttcgtattttaagtgattagtgattttaatataattatttgaattgtttgaacatgtctttttaatcgtaataaaagagatatatgaagttatttataataattgatttgtatttaaaataattcattattatggataaagtaagaaaataaagttaactaatatataataaattcgatcatttttaattataagattcaaaattttatttatataataaacaattgccataaaaatagttttcatcactttcataaatttttgcagcatactttttttcggagaaaaaggtgatgagattgataaagatgtaaatcatagaatcagggtagggtgactaaaatgatggaatacatttgaatttttgtgtgaccgcaaaattttccttaagttaaaaggaaaattctagagaacaactgtaagaccgacaatgttatatggagcgaagtgttgactagcacagtggcggacccaggatttttaatttatgttcacacaattattggtggggttcgggggcagcgctcccgaaaaaaaaattgtaaaaaaaatttaaatcaacattttatgcacaagattataaacccgttcaaaatatagtatgtgtaagatcaaagtatttgaaaataacaacccctaagtaataaaatgagccaaagatgaaagtcaaatacaattaccaacaatattgatagtttaatcacttgaagagtaaaaaatattgtcacaaactattaacaaagtaatttaggctatgcccaagatttctatatcatggagataaacagagcataaataatcaacttttgtatattgaactttacttcaagagaatgaatcagaagagatcctaatccctttatataagcttctactgcaatgagaataattggtacttgctagtaatacctaagctaaacacatatatcacaacttttatataaattcattcctgcttcttgctaatagaagtgtccatcctttgctaataatattttttgtaattaaaaataaaaacacaaaatgttttctcaaaccacactacccctaaagtgccattatcttatcttactctgggataagagctttaaacccactacccaagcaaacaaatctacacagcatgattcttaatttcgtaatccacaccccaccactcttgaatcacaacaattccacgagcatcctcttttccaaccacatatgcgtcaaatgtctgctcagtagaaaatattataaaaaaaatacaaaatatttgtgtctgcacgtgcggacaggaaaacaagtgtgggtctgccactggactagtacataggcaacatgagcacaaaatagggatagtagaaatgaggatgttaaggtgaatgtgtggttatacaaagatgagtaatataagaaatgaaaatattcgacaaaaggtaagtagttttgatgtatgaaaagatgatgagggaatatagattgagatagtttaggcacgttgtgagacgatcactatatgctcccgttagaacaaaagtttattaacaaaagttcgacacagagaaaggtaaaggtggattgaaactcacttggggaaatgttgttaaacaagatctaatagagtgtgatatagattagcgaacggtgtgtcttataacaaagtgaaaaaaaattataaatttggtggagggttaacccattagtatgtctatgttctagtcttcatttttaattcttttcacctttcttttattttagctttttttttttcttttgtcttatttttcctttttctttccatctctctttctcttttttgtctttttttcgatctattattggatttatctactactaatcctaattaatttagattaaaggtgatgttgatgttaatttttttccaagcagcttttatcttagtgagcaaatagttttatacaaatttgtataattttattataaaaattaattgataattttacaggaataacgtacgttataattactttttactaacatattcaattataaaacttatttatataattaactaattgttaaacctatattttgcacggggtgtttataaataataaaaatgtcattttttacaatattagttattatacaaaggatatcaaatgagaaaaaaaggtttttaacctaaccaataaaacaaaatttacactttattaattccattataaaatatttcaacaaggaaattaaaaatttatgataatagtctatctattgaaatgtaaagtttttatatttttattctgtcacaaataactatatataataaatttattaattttgacaataattatgttaaaagtcatacctatcatatttttaattagttaatacttaatagtataaaataattacactttttttatatgtgtaaaactttttatactgattgtgcataaaaattaactcaatttttcttttacttatgtgtcattttatattttacacatcattgaacatatgaacagaggataataataaaatttttaacaaataatttatctctatctaataaacattttgtaacatagattttgatacctattgctgctgctatgatatcctttaaatatttataatgtgaaataaatacattgaagattgaaatatagtatattgtgttttataattttagagaaacttggttgatataaaatatatacaagacaaaaataatgtcaaatgagttttaaaagactaaatgaataatttaaactaaaaaaaaaataaaaaattcaatggaatgtaacccatcatccagcgcaactggatgagtcacatacagtgccaaaagacatgggtactacaaatgctcactttagtggctatggaacaaatgaacaactatcagctcttcctttttccgttgtaggccaagagacaaagtttacaaattgattgaaatccctataatcattttctctactctctttcttttatttgtggccacagtcacacggtaaacattagattgaggaaataaaatctgtcaatgattaatgcttaatttatactaaatacagttaaacagcaagttagtaagatttacccgccttccccttccttcctacttgtctacggaaaattacctgactgagaggaaaatgaattgttgctaataaatcacgtatcacaagttctgctttaacaaatctcttttcatgtgtgctaacataccttacaaatctccaattatattatctacaaatactaatacatgaaaatttttagaaccttttgtaataaaatagattctatatacattagaggaatcaaactttgtccaacatatttaaaaaaatttacttatttactaaacgtgttaaactatattaaaaaataaattttcttattaattatttactaaatgatgcaaataacagggcacagggcaaaaaaaaaacagatctagtctacctcaccaactccctccccctccccctcccaaacccttatttatacacacactctcacattctttcttcacctcttcactctctttctctactctttctttcttcttccccggctcgtaaaccatggctttgttggtggagaaaaccacgagcgggcgcgaatacaaggtcaaggacctttcccaggccgacttcggccgcctcgagatcgagctggccgaggtcgagatgccgggcctcatggcttgccggactgagttcggcccatctcagcccttcaagggggcccgcatcacgggctccctccacatgaccatccagaccgccgtcctcatcgagaccctcaccgccctcggcgccgaggtccgctggtgctcctgcaacatcttctccacccaggaccacgccgctgccgccatcgcccgcgacagcgccgccgtcttcgcctggaagggtgagaccctccaggagtactggtggtgcaccgagcgcgccctcgactggggccccggcggcggccccgacctcatcgtcgacgacggcggcgacgccaccctcctcatccacgagggcgtcaaggccgaggagctctatgagaagaccggggaactccccgaccctaactccactgacaacgctgagttccagatcgtgcttaccatcatcagagatgggttgaagaccgatcccaccaggtaccgcaagatgaaggggcgtctcgttggggtttctgaggaaaccactactggtgttaagaggctctatcagatgcaggcgaatgggactcttctcttccctgctattaatgtcaatgactctgtcaccaagagcaaggtaatgtctcttcttttcccagatctggtgctttttatgtgtttaaatgtagggttgagttcagatctgttgttcttggatgggttttgtggcattggtgatatgaggttttgaatctgttaactgtttgactaatgccgtctgagaagtctggatcggtattaggtgttattttagtgtgttgaaacttgaaacgtcagaacgttagtaagtagcttactaattagactctagggcaatgatcacatgtttgattccgcaaaataaggatttattccgagtaaacattttttatttgaagctacattagataacttttgaattttactactgattttgatttaggattagaaaaacattcaaacataaagcatgtcgtttcaaaattaattttgcaaacatggatccaaactgagtttttcgtgatgagttgtttatggattagggtcttgaaaccaataagtgggtcattgggttttgtggatctagtggattatgaattgattttgctttattgctcgtgttattttttattaaccttttgatctgtggttgtgacagtttgacaacttgtacgggtgccgtcactctctccctgatggtctgatgagggctactgatgtgatgattgctggaaaggtggctgttgtggctggatatggtgatgttggcaagggttgtgctgctgcattgaagcaggctggtgctcgtgtcatcgtgactgagattgatcccatttgtgcccttcaggctctcatggaaggccttcaggttctgaccttggaggacgttgtttctgaggctgatatctttgtcaccaccaccggtaacaaggacatcatcatggttgaccacatgaggaaaatgaagaacaatgccattgtttgcaacattggtcactttgacaatgagatcgacatgctggggctggagaactaccccggtgtgaagcgcatcaccatcaagccccaaaccgacagatgggtcttccctgagaccaactccggcatcattgtcttggccgagggtcgtttgatgaacttgggatgcgccacaggacaccccagttttgtgatgtcctgctccttcaccaaccaggtcattgctcagcttgagttgtggaaggagaagagtactggcaagtacgagaagaaggtttacgttttgcccaaacaccttgatgagaaggtggctgcacttcaccttggcaaacttggagctaagcttaccaagcttagccaggcccaggctgattacatcagtgtgcctgttgagggtccatacaagcctgctcactacaggtactaagtgattgagatgatcaacggaaagtgagggaaagacaaaatcggttttataaatcggattgattgcttaattttccttttttttgaatttttggtgttagactttcagatttgaggtagaagaattttagcttcttttttctttttttaatttccgtagaatttgtgttcgagtgggtgggacgggtaaggaggaagacatcctgttggtttctgtgatatgaaaccaatttggattgaataaggattgttttgtctgggggatgtgtgcattttgctttattaaatactaaaatgtgtttctgtccaccatttcaatatatcaaaattaatcaagagagaaaaaaattcctaccatgtatccagtttcataacacattgacacatcgtgtattatttggtgcttctgcattatttttttaagaaaggctatcagggtaattaagtaattttattatgtaaactcttttttttatggaagttcattcgagtttttctctttttttatttgaaaaaataatgatagcactggatttgcatcgtttatattacgagttcctattttctttgcatatttttagagccttataagttccaattaattcgattttagctatatggtgaattaacttaaggggtaaagctctctcataagtcataagtagaatcaagcttaagggaaatcaagttctttgttaattgaatttacacagattggtgagttagaattcaattttctcaattgttaatttgatttgatgggtgtttacactgtcgtttaaaacctacagttttaccttaataacaaaaatggcttaaaaaatcaaacattttaaaactagtcaagggaaaaattgataaatattaatatctttaactagtcaattgttcattctcaaaatcaagagagattcctttatattactatcaaactgataataacgtaggataataacaaaggtccaaataacctatgatatcgtttgctttgatttctttagtttttgttacaatgataaaaacaaatttagacctcgcccaaattataaaaaatctgatttgttttcatgggtgcttagaaaaagaaagaaaaaagacaaagcatctttagtggtagatctcaaattaggatcttagatcatttttcggtaaattttatagtgtcacgtaggattgaagatctttcaagattcctcctattttgttctttaatggtagatttcattttgaaatcttagagaacgagaaagagaaaaaaaaattattcttttttgaataatatatatatcttaaaggtttttatataagaactcattttttcatgttggagatctctttatcttttttattgaaaaatttaataaaaataagattttgaacttaaaatctttaatcaagattttacattaaagttgttctggaataaaaaattccctacctattctgcaaaatgactctaaattttaggcagtaatccaatttaggctcagagaattcttgtttcacatcaatttttgcaagattccgtgttagatggttctctgtttttacgtgaaaaaaatgagtccaacagcttctcagtgacgcattgaagaatttgaatttgaatatcctaacgtaacgtcttggatgctgttggtaaagagtggtaaaaaaaaaaatttctttgctagaacataggcgctctcgttgtgtcaactattattactgtgtcacccctcttcgatgctagtcttgcattgccattaattacagtaaatttaactacctgtcaaagtcagattcaatacaacccttgtctgtgccataagggcctgaacttctcaatattggtctggaaaaggaccagaggccaattacacaatttgcaattttgcatgtccgatacgccaattgtatttttatacgcagcctcaaagttcaggagtcaaagtatggggggtttgaagacaggaataacaaaaaaaccaagtatattgagagtggtagtaaaggttgattgagagtaacaagtcacaagcgactattgagatattgctaaaaacgtcataaacaaataaaaaaattaacggttcatttgtcaatacacaatactctaaatttgtttaaagtttcactatgttttttttttaacttaaatatgtttttagattatcttatttttaatcctccaaatttgaagatactttctttagtttctggaattcatataatatttttttaaatcattctttactgtattaactaaacgtaaaataagatattcataatttatgaaatttttttacaattagaattgattttctactttatatgtataattttttggcaattaaaaattatcatcatcaagtcaataaaaaaaataaaaaaacccattaattattttaaaatttgctttaaattttttcattgatttaattttaatagttttaaactatcataaattttattttaaaatataaaatagaaaattattttttgagtgtaaaaaattgtccttattctccattggatcacactggtaaaaagagcattactcgactttcaaaaacaaaaaaaaaaactttaaatttaaagaactaaaaatgaaatgatccaaaattgaaaaattaaaaacatatttaaatctgttttcactaatacttttattaagaatcttgaataagctaatgtgaggtgtgaaaataagcatgaagaacatggatattaataatgatttgctatacaatgaaaagacaaaaacagacacacacaaaggaatgagaagtggatctagaaaagtaaaaaagggtcgtatcttgcttagtcctcaatcctcaataaataataacagaaaggacaaaacatagtaggttatcaatcccattactatacaagtcccctatttggtgggttgcgtgttcgacaaatcttaaaactacgatctcagttcccttctgtcgaaggagtggcctcacataaataatctttgtgtagtattaataaataataaatttatgcgaaagtgatgttgttatggcattattttagttcaagacagaaaacatgaaatgtggagtatctgacatttggctcgctctaattattgtttgagatagtgtttttcatggaatcatcattcagttggattcacatgatgcctttagttaaggaaatataacgcatgacactcaatcactatggagaagcactaagcaagttgtttgtatcatatcatatcctatgggagcgtaagcaaccaatagaaaatttatattttagtttaggcattaaatttgcaagtttgttaaatatcatttcacggacaggagtttcaaatactagctcatctcatcttgtggtaggtttggttggattataataatttcaaatacttgattcattttatattattttatatttttttcttctaaatcttaaactcataagttttttagggatttaacattcaataaccaaaaattactttaagattcaattaatctttacgcaagcacgaaacattttacgtggaatttttttctcatgtttattatttttcgttcacaacattcaaacttagaactctatataagtaaatcaattattttacaacttgaaagagacgttagtttaaagaaatttatcgtgtaagtgattttttttttttttcttaacctgaatcaattttgaataacattttttttactactttttactacaataggaagaaagagtagaacttattcgggtaataaaacatcaccaagtaactacattaaaactatataaaagagctagtttgtgataaggaaaatattgttagaagatcttgaaagattaccagtacataaatttatggatatttattcgtgtgcttgggtttcataattttataaatttatttagcctttaaatacaagtttaaatacgttacacttttataatcaccgtggaatctgaaggctaaatcatcacttacatcattagagaggaatatatagtaccctcttctagggaatttattagctttgattgtaaagaaaagagaaaattcgaaaataccaattgttagatgctgaaaagtcacaaaggtttagactctaggctttttagaggtttccggcccataaaggtgaatgttttcaaactgggcttctcaataataggagacttactattattttcagaatcaaagttttacaaaagtaatgtaaatacaaaatgatgactaattgagatattcaactaaatacaaatacttgattattttataaattcatatattgcttatagaataaaattaaaaatttcatagtaagttagaaactattgtttagcaaaaattatattttcaaaattaaactataaaaataattaataataacattaaagttcacaccaaaaacattaaaattacatattatactaaaaaatacaatttagttcctaagtcttagttttaagatttttcaattgaattttacgcattatttgaattaaaatgtatagtaatatagtatttatttaaaaatatgtataagtaaaataaatttgaaaaaagtgtgctgggattttctgatcttgacggagatggaattggaattttttttttattctttcctctattaaacatttaaacctgactccaaactaattcctaaaccgcctttttaccatccctacttaaataccatcatgttttatctgtcatcttaggcccaaaagctttcattccaaaagcctcacagccctttgccttgcctgccgaagcagtgaaacatttgatagatagtagccagtgtagaaaatagtttatcacctcattacctgtcagaggagcactggcttatagatagtagcaatagatttgtatcaattaagataagttttgaaatatcacaaattttacttaagggtttatataacatgaacaaaaaaagattatttgcctgtcattcaactacttaaaatgctgtgtcacagaaagggaaatttatgtttcttgtagggaatagaccaaaggtaactcttataatagaaaagagtgcttatttatatatatatatattaaatgtaaattcagataggaaaagtgaattagttaatgcagatgtgatcacattttccaatataaatgatagaataaaaatcttcatttaattaaataaaaatgacaaaaaagaaatgagtaaagagatgaaaataacttatttcccctctctttatttgattgtttctttgcaggcgattttattttaacaactatgatttatcttctttttggtggttgttgaaaaagaatgaggtggggtgggtaggtaaactgggtcctctttccatactaacactataaaagatgagggccacaagtgctcgagtatggagtgtggatcccctaggggcaccaatgcataaatgctcacttggatagttgttgttgttgttgaaagtggcctaccattacctataggctatagcatagcatgcttggatatatctagtgttaataaaacatcaacattgccatcacaggccattttgtcaagcttcacaaatctccagccaagcatagctcagttttttgagtttgacattggcatttggcacatggctagtggctattgactaactttgcaatgtgaaggctttgccaagagaaacataactgaaaccatgtggtctaattagtgctagtaatctcttgttaattattatatctgatctgttgctaattcaattatttttcctgtgcttatcttccattagtgcaatgcagcacacaatgaaacattttagcatatgccaacccgggttgttgtcccaagtgcttcattgttcatttgttcagcacatttcactatcatattatgatattattcctaaccaactccccccttcccacgcacatcattactataataccatagtatcacaggaaatatcttcatgcaaatacaactctgtctttgtgattgctatggaggataagaacacattatatgcgatacgttagttccatgccatgaagatttcataatctttttgtgaatagaagtagagaagttgctcctaaactagtattttaccatagctttcagctacgagaatactttgttttcgacaaaaaaaagaaaagacttagatcttatgcaaactatccaaatcccccacactaagccgatcctaaggaatttgacgagatcccataaacttattaagagaataaccaaacataaggaagagagagttcataaaaagtgaataattcctagaacttgctgaaaatggctcccacttttgaactttgacacgagaaactattatttctggcagacttttactaacataaaatggaaactacgttcctcttttcataactaatctaagaataagatcgttggagaatgtgttactagcactcttttctatggaaactatgtgtttaaaaactaagatgagatttgttttaaactcggtttgcattttgtatttttcttcttcttatttcctattttctccataccaaatgtgaagaaatcagcttcttttccctgaaatctcgctatagccacgaaggtgcagaaggggattggactcgatgtgaggagcctcattttaaataaaatttagacccattacatattaaataagatacgaatgctcaggttgattgctctgtatgaataatttcctgttaaattttgcaacttgaaaagaagcttgggagaaccacaccataaaaactaaccactatgggtagagtcaagactttataaaccccacactagattccatctttccaatgtgggactgaagtcccacaccttgcaattgataactaaactctacaataaatagattttgtaacagataggcatcaaaatcgcaaagagtatgtcaagttgcagtggtatgttctcaagaacaaaagttagatattttcataattaagctagtcataccatatgttacaaggaaagaactaaataaaaagcatttgaaaagtataaaaacaatgaccataataactacacaggaaagctcataaatgacacaaacaagattagatggaaaaggaaattaagaataataacatacatgatacagccacttgggacactttcctagcttccttcatccattcaatggaccataactgtatcaagttttgatgccttgaacacctcttgcacatccagtaatgacctcacagcccctattataaggatttgctggtcttgcatgacaattgtagtaagaagctcctgctctatcacatggaaccatgtccctcttgagtgtctcatagctaatgtactttatgtgctgaacaccttccagaactctcctgttgctctctgagtccatttctggctctgccaagcactctccaatgcttttggtgcaaacccttttggtcataacggcagtttcactcaaattgaggtccacaactaataggccattgcagattgggagaagggtgtgaagcagaagaacaagtgccaaacatgggaaagtcatgacaatgaatctgggttgggacactgttctgtgttgttttcagtttgttgttaaggttgtgaaagtgaatgtgagagccttagtgggtggatagtcataaattggagactgtgtgtacaactatctctccagttttcgtgcaaaaggtaaaataaaaaatgaaaattgtttttagaagtgaataaataaaactatatttatctttaaatttaaatatgttaagactactatatataggagtatttcaaattaaataaataataaggaatttatttctcaatccccttttaaaaatttttattgcacaaagtttacgattagacaaccagttaattatgttaaaggtatcatgcgatgaaataaatatataagtggagaagtagggtggaattatattcttttcgacacatcctttaatatatttattattattaagaaatttttatgtaagtttcattagatgacttgggttcatattttatttagtaaaattgccatgaaaagacaaacgtgataggaaatgagaagttaaaaagtaaattgaaacaaaaaaaaaagttacaggattaaatcaaaaccaataataatgtacatatgaagcgtaaatattaaattttcctcaagtatatatgtataaagcgtataaattgtatttatgtctaaagtagaccaacaataatgtgcttgcttctgatttaatttaaaacaggttgtgttttcaaccaaagaaattctaatataaatgactaagtgaaattataaggttaatttaatgataaagagaaaaaaggagggagagagagatcctggaattgatttttcttttaataaaaactaataatcaacaactaatatttatggatagaaaaaatctttcaaatacaaattcactttgaaagattcttagatcgataaaaaaataaaaaataaaataaaatgaatttgataatgaaaatgagtttgatgaaaattaaatgtgttctattttagagaagaacaatgtctagctggataattagtgagttatttttggatcaataactcttgaggtatatatggaagaaatatcctgaaatggagatgacattgaacgtattttttatttgtaagggtgttacctttagatccatcgttgattgttttgtcatttttatccctaacaattaacaactaatatttatgaatagaaaaaaaacttcaaatacaaattcactttaaaagattcttggatcgataaaaaaataaaaatgaatctgataattaaaacgagtttgatgatgattgaatacattgttaaatatgataaatatgatgatacatattcttaaataatgaaagtaatgatgaaaagtaatgctacggctaattttgccattattttttatttttctgctaaacggcttctaatctcgtcgtacatattaatttgacaaacaagaaattatcgatcattcatgtattatattgtattaatcacgttaatctttgattttacaaattcttcactttagtctccaattttgtaaaaatcattcatttcagatattttccactatcaatttatacagaataagattaaagtgaatatcattttataaaatctaaaactaaaaatgaaatttttgtgaaattagagagtaaactgactgacaattacaatttcaaaaactaaaagtagggttactcagaaatagacacatttctagtttagagtgtatttggtaatttctaaaattcaaataagtaggtaaaatggaataagttttaaaatcacgagtgaatcatgtgacccacggtgaaattttagctaggggagatttggcttcttaaaatattcaaccagcaaaagttatgaaactaacatgatttgaagacaacatatgattcctgcaagcgagaagataaaccgttgtaattcgtgcggtgtatgtagcgagagaaaatatcgttgtcaatgtgcgttctgaacaaatgttttcatgctgtgttagatggaattccatcatgtaatggaaagtaaagctgatctattcagcaaatacttactgcacagctctctacgcaaacatgaagaaaaactccataatcaagactttttaagtttatagtaatacgtttgaaagccaaacagaacttgaatatttacaacactgtcaaccagttaattaacattgtatccatcagtcccccaaagctgctaaggattttggatttttcccaagataaatcaggcagtaagccagaataactcaaagtgtgagttgatccatgttcttaatgtttctagagattccatgagctgaccgcccttcatcttgttcatcatacgggtttgctcggtagttggatattgcctcttcattgtcagaacagcctggcctttcggtaagaaactgttcccagaaaacatcattcaccctgtctggaggagctgggttaacttggttgttacttggatcctcctgggatgaagctaaattggcctcagcagctacatttaggtttgaggaaacaccactatcagattctttaccattggcaaaaaatcttgattctgccaattttccaatttcttggcagtcaatttggggtgatctggccgagtatgaatttctgttgacttgcaatggacaagatgccagagttaagtttagttggcaggataaactatcaccttcttcactacttggctccaaagagatcagttttgagctctcagcagttgttgctcttcgcgataaacatgaatccatcttaaaagtaaaagaagccccagtatctgcaagctctaatgtttcaggtgcaaatgtaagagctgttcttgtctgcactccttttggttctacttcagacagctttttctgtgggctttccccatcttcatttgaactctgtgtgctacgtgataccaagttcatatctgaaacagcgggtgacaactccagtctaagtttattcgagaaatcttgatggaaaaaatttccaaattccattctaaaattgctatgactgtccaccaagctactttcggcaactggttgcacgtgatcaacctgaggcaatcgccttttcttatatgcagataaatccatggactcgattttgcgtgaaagatgttcaacaaaagtaggattctgaagagccttctcaaagaagttcagcaattgtttctgcctcttctcaataccatctaatcgctgcagaaaatcttctagcttaggctttgctgttgactgatgttgtttgaagttataaatattggattcaagagaagttttctcacgggaaagtttgtctatttcttcctcaaatgctgccctttctggatctacaagagaacctggaggatgactatgactgtggataggtttcctgcgatgtatattcttaagaagatgcttctgatctttcagaaactcatcattagcaaattcccatcgctctggatgtatttttcgaaatccctgataatagagcaatatcaatagaccaaaacaaataaaaccaaataatggttttattaaatgctcgaaaatatgtattaagaaaaagaaaaaaaatgatcacaaacaataatttttttttcaagcaacaagaactacaattttctttgaataatttaccattaaatccttacaggtatatactctttacaagaaagaaacccaccctctggaaagtaaaagtaggcagtgtttgagttgtgggaaagtaatattaaagaactgaaattatggtctgggtttatagtaaatggaaaaattttgaggactaaagttccaaggcaacccatgaataaaaaaaaaaccagtaacacaaaagtactaatagcctcacaggctcacacaaatagggatctaggaaataggaagcaattctagcaagagaaagcaacaaactttctagagtttgattgcactcaaagttgaaattaattactgtctgtaatagtacagagctatagaatatgcatgggtgatgggtctcaaaatgcaacctgaatgggcctacacagtaatcatagccaacaacatttcccaaagacagaaaattaaagcccaaatatccttttatgactcaatatccataaaagaaactaaggcattagcatttaaatacaagcacaaaaatagcacctatcaagaaacaagtaatcagtacctctgtggtggcatgagctttgatgacaatcttggtttatagcaagggttggggagctcaaataaggtacatgagagaagtattgggtgatttaaaagaaaatgaactagttgcaaataaaaataaatgtcaatttgggagaaaatttgttgagtatcttgggcatattatctcaaggaaaacggttcctagttggctacagacacaaaaatgatcaagagtgttagaatggcctatatcaagaattctaaaggggcttcaagggttcttgggtttaacaagaaattaccaaattttgtaaaaggataatggcaagatggccaaacctttaactgatttgaccaagaaataaggttatcatgaagtttgaaagatgtgacaataacagccccaatattaaggtgacaacatttttcaaaggaatttgtgattgagtgtgatgcctttcgggagggtcctagggttagtgaatagtgacaaaacccatccaaacctgcttacgagaaggaactaataggtttggctttagttatctaacattggcagccttaccttttggggagtcattttttggtctattaaaaccaaagaagtctaaaagaattgttacagtagtgagtaacaaccccagatcagcagcgttgttggtcagtcaaaatgttaaggtaccagtttaagatgagatacaaactggttatgagaatacaaaaatataacggttacaaagtaaccatgtctactggagctcttttcctttcctttgttagtaattatatcttcactttcaaattcagttcattttaatatcagatcagcacaaaaagatcattataacacctatttcaaccaagaagttaaggaaaatgtattataaaatcgagcatttttatcaattgatcaaataaagtgccagggaatatgtgctttggactgaaaataaagaactgtgagtgtaaaccatcaagtgcataaacactcaacagttcaatagcacagcccaagaagagtatttacttattattaggcatctattttgtgttaagacctactaatagacatatgcacctccatcagccatcttttttctggataaagaaaaacatttatagtggaggaagaaagtttaaaggtaaagtaacaaatcctattcatgaaaacaaccgaaaatgctctagcatgaatttttcatcaagtttggtaattttatcatacaatattctccagtgctcctagaattcccaatggtttccaaaacacaacattaaaaagtaccactctgcgaaacgacaatataagaaaattgccaaattgtcatgctaatgtctaatgacacctgaaacttaggtggtattaaattcgcttttggagaaccaagggaaaagcatatataagtttttagaaactgctttatactttttactattagacgttgactggtattaaacacataagaagaatccaaaaaagacagaaagagaaattattgagatctaatgatctatattgacatttgttatagataccaaccactatttctaagataggtcaagtattaatgtacaacaaccctcgctagcagcctactaagattgctaacattgtaagactcataaaaactaagaatcttaatattctaattctgataattattcaacatgcatcccttgtcaataatagaatagcagaaaccaggattaaaaactttggaacacatttggtgatttggtaattcatgagtacgtgatatatatcaaggggttgcagaagatcgataaaccttctctgatgaatgctaagtcctatactaccagattcttattaccttctgctgagtgcctaaattttctggtacttgagcaaggaataccacaaggcacagcataagattattctgatcaccttcctcaatgacttctgaatcctatatcccaattcacattccaaaaaaagaaacctatgtttcaaccttgtcaatatctttaactttaagtaacatatatcttcagatagactctatgagatccattgaaggtctctctatctcactatgcattctctccatctcacatcatcatcattaacatttcaattcagctcagtgctaatatccaacaacaacaattacaaaaaaatagtaaaatccggcgatcatttcaagacatgcaaacaactaaatgaaagacagaaatccgaagaacgaattagaatcgaataaaaacgaagggagcgcatgaaccgaagcgaaacaaaggaatcgaagaaacgtacgtaggtattgagctggcggatgaagctggagaagttgttgtgcttgaaataggtcgggagaaggaggcgagcgaactcgggagggttccagacaacgaagctgttgttggtagagctccacgaaacgatgtcgttggtggaggcatcgtccaccatgtcgtaggtcttcagaaggaacggcgccggacctccggcaccggcggattgtggcgcaccgtccatttaggaatggatctttctagaacctctgagagagagaaagagagatcatgggtaaaggaagaaaaccaggaatttgcaactacgctgacgctatgcagtttagagagagaaagcgagaaagagcggttttgtttgacttcaacgccgtctctaccgtagcctgctgcaggttgttgggggattgctacccaccttggaatattggaaaatatatttttgtttttctttttaatttcttctctctcttatgtattactatcatatagactctttcaaactcactatattagagatactcaaatatttaagaaaattttacatataataaaagtaaatattttttaaaaaataaatcattctcacatataaatataataaaattttacttatttgcgtcaattatttggctttaatatattgatatgataaattcaagtacgacgaattaggagtgcaaaaatatcactaattttgaagagaaagcaagaaaatttaatttttcatagcattttgaggattttcaaaaaaaaattctttaacatactcagttttattatttattaaaaattataaaagatatttattaaattaattatgtgacctataagatttcaatttttttaataaattttaacatatagaagaaagtatgttcaatataatgtgttgataatatttttcttaaacttaaccttgatttaaataatgtttagttgatttttatatgaaatttataaatatataaactaaatatctcattttacttgaacgtttttgttctgaattatattttattttcattttgatggtctaaagttaattattcgttctctctcttttttttctttttttttaatactttgttcaactactaacgatagaagaagagaaacggtggtgaaatgatagtgttgacatggtgttaggcgaagttgaaaatcaagcaaaacatctattcatcataccaatgacatgcaagaggaggaaatatcagcatagcatcactatcgtagaagaataatcagagtttttttttttacttttccaaaaacattttgcatactctagatggttttattctgactaaattatgtctacatacttctcatcgtatcttctgcacataaggatgaagaaattgagagagttcaatctacatggaatctttttgcttcctcccagtcttgacaaacagtctttattttgaatattgccttctatacttatgtatcatccttatctctgaaatttacaggtgaagacgacaaaattttcttgcattttatacagtattttgtaagatccaatggaattacttttcttgatacatgtatttctttttcattgtatttttttatagtcttatttttccatgttacttttttatgtggttttttataggtggataagagaagaaaaattaacgagttgtatatatttattaaaattaaaaaaatagatagtatttgttaaatcattgatccaaactgatcaatccattttttattgaatgattcaatacaaatagactcgattcaaagatctaatatgtaataatttgatacaataaaaatgcagacagataaacaaaacaacgcttatgttttcattagtaatatataatgacattaaatgtttagttgcaaataactgttttggatgttttaagattttttagaagtgagtttaatttaattgcaaataactgttttacaaatagtttctttacaacatttgctcctctaactaattgttccctcttttgagtgtgatttctatgttatatattgctatgtttagagcatatcaataatatactatattaaataagttgctagtaattagatgtttgaatgtataaatatatgtgttgagtcaataatttgtatgtcttctttttaacctatttatctatctatatatatatatatgttaagaattaatgttttaagatattgaaaagatcaatatttaattacttcacttcaaaaacttagtatgcaacatttgtaaatcataaactatccataaaaagatataataattatttaaaattttataagtcttaaaaaattcttattaatatagtatttaatactttttcacaccataagaagggataaaaatacattttagttttagttattcaaaagtttttattccttataagtttgttatataaaataatgagtaacttatacattgtacaaactaaaatactagttatatgtatgttattattttcaaaataaatcttaatttattttaaattctatgaaatactatttttttaaattttaagtaaattaaaatatttgtatatattaatttgatttattaaaaatacatgttaaagtgatttaatttatataattaaataattatatttatctcgtatatctgtaggattttaaaaaatatgatattttcctcattttcaaaaattttttcaaaataaaaaataaaaatattttcatgagacacgaaaattatgtttaagtctttaaattttcattcatcgtcttacacacgtggggattatttcagtagcgtgaaacttccagaataactctaaatcagttctcttcagcctgcgctctttcgcttcttgaaaatctttctgaggtatgttctttcttccttttcaaatatttcaagtttactcctttgattttcgttttatcttattatttgttttctctctacctatcttcagaatcgagtcacagagtagagcgaaatcggcatagtggtcgcatcattggttttttgccctaattttatttatatggttgaatgttgcagcttagggttttcttcaaaattagtttcacgtatttgatgtgaaattcaatcaaatttggtttaggagtgttcctatctacattttcatgaataactatagcctgaccagtgaattaagccattcgttttgtttttcacagtttgtgaattgtgactgagtttctcttcccctcgttcatggcttcgtgccctagcctcgcaatgttatttatatggttgaatgctgtggcttagggttttcttcaaaattaatttcaccttttttatgtgaaatttcaaccaagtcaaggcatagagtgttctgttttgctgagttatccgatatctgcatcaatagcgcactatagcagtgcaaagcggccactgtaaagttttgaatagcggtgtagtggctgcaatcacggccaaaatagtggctctagcggtgataagtggcgctagattgaggcttctttctaaacccatttttgcccacaaaacagcatagtttttcggttaagggtgtgttcttagtgcacagttgagatttgcctccccttctttagaatttaaaaatccctaattggatatagtttctctcgcttttatctaccgtgtgacactcactatttgactaacttcggtgcatctctggcagtatttctgccaacactcaccttccatatttttctcctttgaactctgaacttctgttcttttatctgtgcaacacccaccctcactttttattgaatgtttaagatgccttgtatttgaaatatgaacgtgcctttcaattttgtttgtttccttgacttgtattgtatgttttgcttaaaacctataaccttttattattaatgaatatatcatgaatgttgaatgtttgtcatttaaactttgagcgttaaatgtatattgtacagataaattatttaatctatatataaaaattcagaatattgcccatctcactatgataaccatgcttacttgataacatgtaccaaataatatgtaccattatattgcttgggagaatgtatggaaattgagtctttgatgccacgtattccttgaacagatacaaaaatgccgaaagtaaagacaaatcgtgttaaatacccagagggctgggaattaattgagcctacactccgtgaacttcaagcaaagatgagggaaggttggaattttacatcatgtgcttagtagattttattacgttcttgctgaaatccatgaaattaatagttttatatcctttatgtggcagctgagaatgatccacatgatggcaaaagaaaatgcgagacattatggcctatatttaagattgcacaccagaagagccgctacatatttgacctctaccatcggaggaaggaaatttctaaagaactgtatgaattctgtttagatcaaggatatgcggaccgcaatctaattgcaaaatggaagaaggtatctaaaattagttattttattctatttttgaaaccggtgttgtttttccatttcttttaacataggaggaagttctcaaaaaatctgctagttaccaaaaaataaaagaaattctccaaaacaaataagactaattcaataaaatgagccaaaagctgcgtgaaaggtctattgtgaatttgcaacaaatcatttgcattaatcatgttaagtaccactggcctaacaaaggacatggcttttgaagacaggtttgaattttaaaatggatttatcaagtagaaactaggttagggtgtgtatgaaattgaaagaaagctctgcaggagaaaatactgaaagagtccatgatccaaactcttctatctaacttagttgagggagaaagagactcaagtaaaaagtttaaaaccaaaagggattgtagttcactatatcacccatattcaaatctcttaagtaaattaaagtccctatgtaaataatgatcttggattcttagccttaattagaaatggctaatgagcaaagtagatagttgaaacatgcaggaaaagtctctgaaataggagcactccccatctcaacttcctctcaaaacttgacaaggataccattataccataccatcacccaaacattagtagtgtattcctggaaaataatcttccaattccaaaatctaatatgagcagtgttgcttacttggtcagcatcccacctgttctggtgggggttgtacttgctcttatatgcttggtgagttgttgactcttttggcattagtctccaaaggaaagtgccaaagtcatttaacctctgaaagcaatgtttgtgtgttaatatgccaaattatgaacccctaaccccccttcattttaggcctatgacaaacctcccaagtcccaaaaagaatgttctcttctctgtttacccacagctgatcaatgttttgtgtctttgggtcaatctgagctcacattgtctgtctgatattgagtactggtgaatttagaaagtatgttatttctgtactcatttgtgccttctccgagatgttaattgttgtaaggttattgttacttggtagctaaaaacgttaaagaaataggtattgttttactgtcactaagattttatttgatttgtgcattctgtgttttcttggattttgagtacttaaatcattatgtttttggtctgaattgcagcctggttatgaacgtctttgctgcctgaggtgcatgcagccacgtgatcacaattttgccaccacttgtgtttgcagagttcccaagcaacttagggaggagaaggtcatagagtgtgttcactgcggatgcaagggttgtgcaagtggggactgattgaataccgattctagttttagttgccaatggagggtttcttagaattactttctttgtgcttttagctttctgttgtccgaaatcctcaccatgggacaccacttctccgggttgtattactgtactaaatgatatttatattgggaatattggtttcatattagtcatctgcctagttcaaaatctgactggagctttgtacctttacattgattagcctaatatggtgtacttttgcttgatactttacagcttaaacaatgggcttaaaatactcgaaggttagtgtaaatttttaaagctgctttggttaagattggagtcaagctaaatattgtaaaagttattttttatttaaagaaatcaattttgtgagggaaagattgtaaaaggcaaagcattattatgagataaatacatttttgtgtcatccatctcccagtcaattcatttgatgagtaaatcttgaaatacacaaaatgaaaataactggtgatatctagtctaactagttgagagtaaatactatggacggtgttgtttccttgaataattttagtagtggtgtaagttcttgtaatcgtgttgaacgtttgttttgttaaacataaaagtttggagggttgtttcaacttaagattaataatttgcttattttgcagtcaatttatttagcagttcttgaaaacaatttttaaaaaaattctctttcagaatgtgatttaacgtagatgtttatttcaaagtgtaattaattatattttgaagaatattcttgaaaacattctgatgaaaaatgtgattaccgagtaaactaaaaatgtaattagtatagtatttaaaagtggatcaaatggggggaaatttcctctgaagtgctggaaaagagctgaacccatcaaatggaggatagttcaattaaaaggagcagggggacaaaagaaaatattaggggaacccattaaaaaaggctacgctctatattgttttactgaaaataaggatattgctagagccctacagtgtaattgatccatgtagacaatttcaccgaatagagtaagggtgtgttcggtagagtggaaaaaaaaagtaaattaaaattaaaattttgaattaaagtaagatttaaaagtgtgaatttcatcatttattttctttttcgttctttatttcctcaaatggacgggcctaggagttggttgttttacaaaaaccattaccccacacatattgtattggtcactaagaatcagtcacatggaggcaggggacaataggatataaccaaaacatcaatataaggcagctcatttatcatatatgtctatcatgatttgtgtgcagtattatgttaatctcaatgctgattaaatgcatagcatacactttttcaacagacaacgtgatgcataaccaatgcgtacgcaaacatatccacaacacaattcatattaaaagaaatcaagtgtctgtgcagacacgtgtatcagtacagtaaatgtacctagtatgggtacaccaaccatgcaggagtgcccatgtaccttacccaacatctgcttagatgtttcaatagatatcattataaccaagtcataatattaagcattttgatgcatatcaagttgagaatggaaagtgctttttgattgccaaatcatttgccaaaaacaattttgtcgtccaaatatacctctaattttgaggcactaatgttccagtcgaatagatccatccacatataatctatggcaagtggcaactaataaaatgttcagaaaacaagattaaaagctgaaaaaatgtttcacaaaaccagatattgttgaaatctcatttaaatgataaaccactaaaaccagtgtcatctcactgtcaaggactactgttccttggcacatttgaaccatttttagctttacattggagcaaaatatgaagcattaggcacaaggctgcaacccaataaaatttacaaattacccctcacttaatatgagaagtgcccaacatattgaatattttggttatagacaaaagaacgacatgacagaactttcaagaagacatgatcacaacttcattctatcactaaaccatttggcagaatcagcatttacatctcaaaacccagtaaccaatctaatgagcatcattgcttgatgagcaaaccatctagtcgcccccataaaacattcaactgagagtttttgtcttacctgtgtaatgataacctagtctgcagccatagaaagaaaaaaacgagtgaatttataacttaaagagatgaatattcaaagtttcaaacaaaactacttatggtaaagaaattcgaattacaaaaaaaaatgttgtgcagatattacaaagaagaaatgtttgactaaccttctgtgatccatcgctgaattatttgtggtcctccctcgtacataagatatagcaaaatgagtgcataaagtgatttcaatctgcaaatcaagaaccatgaagtcaaactgttattttaaaaggggggaaaactgtcaaaagtaaataaaaatttgtttgcagagaggacagccagcatcgctaaattagatcttagatttttgttttctaacaggtaataaatatggaaaatttttcccatcacaaacaatgaactaggagagaaaaggagtacagtgcagaagtatcaggaatcctcctgaaacagaaaagtaaaatacacaagaaaggaaacaaaatataaaataacattggctccaaagagatatctatgataaaaggaagctactgaacactagctcacactacagtatttttgagtgaggagtttctatgaaacagaaaattcttgggtgctccccagaagttccccttctatacggtatatcagaccagaagatgagatcttttccatttaacttaataaggtgtacattcatagttgaaatttattaattttaataccagtagctggaaaaggattaagttctaaaaccagcttatgatcttattaaatgtttttacattaatggaatccatttgataaatgtataaaactaagcaataagcaattacatgatttcttgggtatattgaatttgccctggcagaatttatgctgacaattatcatttcctagcaatattgattgacttatccctaatgttatggggaaacaaaatatcctaatgtaacttgcttcatcattaaacttacttgaaggcaaatatataattggtaaaaaattactcagttccataaaagtgcaaggatatggcacaatttctaagttgtatataggactattttttctaagctattttaataacttgaggttctatcaaaataaatgtgcaagcagaggtgaaaatacttaccactaaaaatgtcaaggaacaattctcttgacagcttaagctgtttggtggagctaagaaagatttatatctaacacccccttaaacagagctttttgagtttgaagtgtggacaatgcacaaacccactttaccttggggctcaaatacaagttaattatgaagaagagaatcaacaaggatcaatctcataatttcttatttatgaggcttgtgataccatgttaaggaccaactctcctaatcacacaaattgtcaggtggaagcacttaatggtaatggttttatatatttaacaaatggtaagttctgaagcctatgccagttctctctatggggtcctataggattgtggaacatggacgaattgagagtcaggatttgaataaatgtcctagtgaaactcttggcatttgctatctttctggaaacaaaaattctcgaattctggtgtctccttcattagtagataagtagttgataataatttctgtggtagcagcatctactgaaaaccctttgtctctcattattgtaaggtattttattgaccttgcaagctccttttttgtcagcaagccttggacaaagacattgtaagtgcagttatttggctggcagccattcacttccatatttatcagtaagtcttcagctttatccaacgagccttgtttacagagacccttaatcataatggtataagtataaacgttaatttgcaaacctttaccaggcaaactagaaaagagttcccatgcagcattcatttttccagcactgcacattccgtcaagcaaaatactataaattacaatattaagatccaaattactcttctccattgcctcagccaatgacacggcctcagaaagaagattttctttacataggccatccaatataacagcacaagtctggagattgggtacttgaccatatttgtgcatattaaaaaacagttcttttgcagctaatggtctacctgcttgacaaaacccacctataagagtggtccaagtaacaacatcaggaacaaatcccatcttactcatttcctccaacagatgcatagccttattaatgtttttgtccttacaccatccatggataagtgaagtaaaaaccacaatgtccggtaaacggcccctgctaaccattaaatgaaatactctcatggcctcattcattttattttgcaaacaatatatatgaatcaatgaattataggtgaagacatccggcccttccccagtcagaatcataaaaccaatcacacttttagcctgcatcacttttccttctttgcagaaagcatcaactaaaatattgagcgtttgcaaatccggcctcattcccattttcatcatctcatccagcagagaacccgcctctttccatcttccaaaattgcaaagaccttgaatcaagcaagcgtaagtgaccaaattaggtcgaacaccttttccattcatttctgagcacaaattcaacgcctgagataataatccatccttgcacaaaccatccataattgtactgtaaaccaccacattaggtttccaattcctttcatccatctcccttagccaccctaccgccgccaaagtgtctcccgtcttacacaacccattaatcaacgccccatatgtgtaaacatccaatggataccccattttctccatatgatcagccagtcccacagcctgagccacattgccctgcacacaaagcccgttaatgagagtggtgagagtcatcacagtgggctccaaaccaagtttgaacatagtccccaacacagagaacccaaaagcagccaacttcaaacggcaaagacaattgatcactatattaagagtaatggtatcagcttctatgcctagagaagaaaacatgtgcttaactaaagagatggcagtggtgtaatgcttcaacctcacaataacacccaacaacaaagtaaagtccttcacagaaggcaaaggcttcattctagacatgccgtggaacaagtccaaagcttcatcaatattcttcaatttatctgacctgcataggtttctcatggaaatcaagaactgggttccgttgctatggctctcagtgtcatcagtgtttgtggagcaatgacagtgctttgaaaaagacagagaagaagaaggagagtggatggaaatggaatgagagaaagtacccatcatgtgatgaagaagacgaaaacgagagaaagagggtactcttcgaagcattaaaaactcactcttttgcttccgaacaccatcagtgtcggaaacaacttgctgcaaccgttcttggttgcagaatctggcaagggtttaggtttttttgtcaggaggctggtttaggattttgaaccgttaataaggtacaatattaatattattgttgttattattattattagtagtagtataaaacgaaaatcaaataaaatgcggacaagttgtgttttgtttttaataaaaaattaaaaacctagcaattatgcttatgttcaaataaacaaaaagctcagttaacagttaataaaaacataatattcgtataaacatgtcatttacatagtataaaataaaaatatttaagtacaaagcatattaaagcaaacaaataaaaatttgcagatttaataaaataaatttgataggagaagctgggtttgggcgacgcgagggttccttccggtcgctgtaatcgtaagtccttcaaacttctctcgtccctttcttctattcaactgttagtcttttgaacccaaacccttcgaatgtttcgcatatcgaattttatcattcaccattgatctttctgtgtttcttcatttatttatttatttattttgcttttcatttaatctgaaatcatctgttgctgtgttgtgcaaaatagggtttggcattgaagggaatcgaaaatcaattgagtaagaacgatgtcggtgacagcgggtgttagtgatactgtgatagcagttagggataagctcagaggtaaaattggccaaactaaagttaagcgttattggcctggtaaagttcctgaatgggctgatgatgagaacgaagatgctgcccccgccgatattagaccttccagggaagctgccctggaaaaagcatttcctcgtcacgaagaagatgctgctattgtcagaaaagatgatcgtaggctccgccgtttggctgagagccggatagataaccgtgaggaggtccgagctgatcatcgccgcattcgccaggctgaaattgtttccaccattgaagaggaggccaggaggcaggaatggttggagtttgaagaagaagatgagaacgctctggcggaaagaaggaggctgattaaagagaagttgcttcaaagagagcaggaagaggcgcttcctcaggaagaggaagaggaggaagaagaagaggaggaggaggaggaatctgagtacgagactgactccgatgaggaatatacgggagtggctatggtgaagcctgtgtttgttcccaagtccgagagagataccatcgcagagcgtgagcgtcttgaggctgaggagctggctctcgaggataaaaggaaaaggagattggaggaacggaggattgagacgaagcagattgttgttgaggagatccgaaaggatgaagaaatccagaaaaacttggaaatggaggccaacattgctgatgtggatactgatgatgaagtcaatgaggcagaagaatatgaagcttggaaagtgagagagattggtaggatcaagagggatagggaggatcgggaggcaatgttgaaggaaaaggaagagattgagaaggtgagaaacatgacagaggaagagaggagggagtgggaaaggaggaatcccaaacctgctccaccaccaaagcagaagtggagatttatgcagaaatattatcacaaaggcgctttcttccagaatgaatctgatgaccgagctgccactgttggatctgatggtattttcgctcgtgatttctctgccccaactggggaggataaaatggacaagacaatattacccaaggttatgcaagtcaagcactttggtcgtagtggaagaaccaagtggacccatcttgtcaacgaggatactactgattggaataatccgtaagttcaatttctcctatgttctatatctttcaagaatagtggtagattgtttgttctattctttggtattagatctttgttgttttatcctgagaatttttttttggcatatctgttcatatttacttatgaagttcatctgctgtggcactggtccaaaatgatcttggacattacttttatgttcatggaatgaaattgagatgctcatgtcaaaaaaattgctgctatttgtcatcagaagaatgagatgagtatttttaagaagaatggttttgtgatggaggccccaaggcccaagatcactaaggtgtatgtaaggataggcaaaaggttcacatgatcaattttaggagagatataaccaactgccaaccctgtagcagagcatgggaggagggcatgtgggcttgttctaaggagagagagaatattagcctgagaagggtgtgtagaaggtaggctggaattaggcttgggctgggagagaccacacactctcgaaactgtctaggaatcttttttcattttgtaccattgtacacagaagataccaggatctgaactgattaagacctgttactggaatacaaatatttgtatgcttaatttctttgttttagtctttctagcttgctggtacctatcattttgctttttaaggaatttgattgtgggtgagattgagattcaagagggagagttgattggaaggaatatagttaaaagacatgtttcatttagagtaagcatagttatgccatctcacaaatcctatttaatttttttggcattcattttgtagaaatatgtacttggcttgaagtttattgtttacaactttcttagtttctcaacttcacctgacaacctcaccttttatgtgaatttagctggacagtaagaagggattatattgaatgtcacaatttaaacgagttgcatattagcagcccttgatatggtttgagatcttgacacaagtgcatgctcatgagttatgcttatttgttttcatagtacttttgggtttcacttttgtcatttgcttgcttgtaatttgtgaagttgagaggataacataacatatagaagttatgattctattttaatttatagattaaggtatattctctgttctgagaacatatgaaatactacttttatgattgattctgtttgtgttggatgttgatgtaacttgttaaattgattctgccattcttctgattttattacaacaaaagagtctacacaatttttttatcacacctggattttatcatgcattgtgggttgataggcttgcagtcatgctatcacatattgataatcatctttggaataatggggtttagtatgtttatgtagcattctctgcattatgaaagaaatttttgcattggctttctgcatcttccttttcttgtgtcgaatcgatctcccttgccaagaatttggagttcgttaatgcattgatgataggaattcaattttcttaatgtgcaactaaccccttcccctgaaaaaagggtttctttagtactactgcaatgagccttttatgcttatatattgactgctgcaatattatgctctgatgttcttgttattgttgaattgtaatgcaggtggacttacaatgatccacttcgtgcaaagtataatgacaaaatggcagcaatgaatgcacctatagtgaaacctaaaggaagcaggaaattaaaggattgggaatctcgatgaacttgaagttacaaaagtatgcatgaagatatcatcctttcagttattagactttggagaaataccagagtagatatgtccttgtcctatgtatgattgtgttctgtcttaaacagaacgtaaagtagttcatcacggctggagcgtgtatgttgtggaccatggaaggcaattgtgacaggaattcagcgctagtttatctggatattcttccccagttaatgaatcatagctgatttagagtcctgccagcccagcctaatgactatgacttcctttctttgttttgtcatcattttgacttttactggctggctatgaggatttaattgagattgctgcctctattgatgctttaggagccactgtttttcaatctaagatcatttatatgtgcaacttcgatactgactggaactcccgagacgagagtgacactgaattgatggtgtcaattggtgtactagttcactagtaaatgtagcataaacttccatgtttggataatcttctagctgaacaaaggggcatattgaaagttattcattcaacccgctgcttgtttgtttataggagttttttgacaaattaaatcatatttatattaatccaaaaaatattagagtaatttttttgggctatatataatctaataagttaaatatgaggtccatccaaaataattttttaaaagagcaaagttcaagatagaagggcgtattttatagaatccgcatcataaatcaaagagtgaagggacaaatggaaataaattacactttggtctcttattattttcatttcttaaatctggtttccattttttcttgtcaatttgatcctacaatttaacttgtataatttcatccgttaatctgatatttgctgaagtggatgtgcagaagcgtcacattgatgtttttgctaattattgaatgtcaaattaatagataaattaaaattgcacaattaaaataattaaatgaccaaatttgtgaaaaaagaatgaggggaacaaatttgagaaatcacagcataaaagatccaaaatacatttgagccaaataagataagaagaagaacggaatatatcttccactggcttgaacactttttattcactgacttgcatgaggcaaataaaataataaaagaaaaattggaaaataatatttaggtaaaaatataaatacatttttatcactcattttttacatcaaattttctcaagagagtgcgttgactgctgttgttgctgcgagtttgttcatgtgtctttctggaaaaggtgagttgctgaattattcatatatgtttagattcgttatattcgagcaccacttatcattatggtacatgctgcgtatggcttctgtaacatgtttcaatgttccgttagttatcagattcttgacaattactgaatcattttcgcattttatttgtaattaaaagcttcatattctattcacttatatatatatatatatatatatatatatatatatatatatattccacatattttttttaaggagtgtatattgcaattgatgggtgatgtctacgtttataacattacaaagtctattccgtatggcattgtagcttatggttgtcttataagcattacctcccccccccccccccccccccaaaaagtagaagaaaaatcaaattccatctagcataatggaacaaagaaagagttgggagataaaaagaaaaaagattattgatacaatcacagcagttgatctttcgctattgcacttaatattcacttattcagaattgattacctacggtcacagaataagaattcttcattcacagtattagttattagagaaccttttggaaattttcatataatttcaaattcaaaagtaaattcccatcaaatttaatggacaacttaaagattatgtgaacaggcatgattcatgaacaaccttaaaccttaaagatgtttgcatgaagatgcaatcaagagtcagacctacaacgataatacttagagcagcctctattttgaggatttgagggtggaggaagacaccctccagttttactataagcttcaccagagccaccaccattacaaactggtttatctctctgtaaagctccattggaaatgtatgatctcttctgctccaaaaaccttcggcttatttcggactccatcaacagctcatcttcttgattgcattcagctatggaaccattgcatgtgcttgcatgacttatcaatgagagcacagtgcagctgctgaaatgcataaagctgaagagcatgaagtagcagaaacaaagaagtctaacggtggatgattttgaggccattcttctgttgtctcttggatgtactcttccctccactctcccactaataagcactatatagataatattagatcatatgacaccacctttttgaaaaggtgcaagttgcattagtgataagcagttggagcgcacttcaccaaaccttttgttttggacaacatggaaattatgttatttgccatgtgctacagatgtttttctttctttcttttctgtgaagactattgatttactctgctaataagtgattgcatatgtatgagataactgagttgctctcggaagataaaattctaatatgtcccaagtattctgtatactataaatagactaattaaaaattccataccaaataatagtaccccaaaatgaaaaaatatttatagaaaacatgtggttggttttgtggcatttgaatatgatgatatttttttggttcctagttttgttccctgggtaaaatctattcataagaaaaaatttgcaaaagggaagccaaaaataatgagataaggtgatatttgatttgagtgtttattttttagttttattttttcaaaatattttttttcaaatttaccagatttagaaaatatgtatttgaaaaaaaaatactttaaagtttcatcacattttcacttttttaaaagagactaaaaatattaatttgttgttttcagttttggattatttttaaaaatatttttagaaaaaatattttctaaattttaaacaaatatattttcacttattttttattttctttaaaaataaaaacaaaaaacactcaaatcaatcaattgccaccttaagtttcttatttgaaaatccttacacacatttaagaaagtataaatgaacaaatgtggagttaggtaaataggattataggaagggtattatcatgacaaaagaaaaaggagagaacagaagctaaggtgtgtgttgatataatcatacatctaaaatatttggtacatattcctcgaagttgccccacctaaactctcagtcttctatcagacaatggacctcaacatacaattgtggtggggtccctatgggctatggatttcgggatttcctttgactctaataaaacgaggacaatgactttgagttcctttcacaccaatctcaaattattgcactcatggaaattgtaaagccaaggatggttccaagcatttacttaatttcttcctctattattttagtttaattacacaaagtggcacacactgcacaggtttgaatcttcacaccttgcatagcattcttggaagcatttcctatcaatagtatgaactagtttgtttcaaactgatactgtgtttggataagtactcctatttaatatcaagacaaatacaggcttcaatagttgcaagcaatttggacctggcaataattttttttcatatatttaacatgataaaaacaaaatgggggtagtgaagttttttttttttgcacgtaggacacaacaatttttgtttatggacccagtttgtattcatttatcaggttcaaatgatcagagtttttttgtacagtgggccaaaggggtttgatgttggattcactacacttcataaaatagatgtagactatcgagttcacaaaataaatattacgaatatatgcaaaaattactccatgccacacaattgtgggacaacaaaagtagatacatgccataacaatttttcttagcttcaaagaaagatattgaacttcatgtcattatacagtttattatttgatcctgtattattgtcttgtgtttacaaagcagaagccaaaacaacacgcatggccaggaaagcactcatcatagtatatgatttccttattcttcccattgaacggactgaagacttcaatttctgctgttgcctatcctggagcatcctctgttgtaaggatttgatgctggcggtaagcagtttttgctacatggtgctatgttgcgcttggtaacttccataataatgtacttgtttgcatttttagcatgattttaagactccatttcaacccttcacataagcttactgcttcattcctcacaaatcattacattttctggtactgattttggagttaagtctgtccatttatagtgctaaaacttgaaaaatgagaaatgagaaccattggtggtggtcacggaataaggcataaggaataggttcaccttcaactaatttttgcacagaacttttctctagaaactagaaagttgattctataataatgttgttcaatctcatttattttaactttggcgtttaagtgatggtattgttgacataactgttataagcttatagatgattccacttattagcaaacagaggttcttttcaaaagtcaatccaaatgagccagtcattttcaaaataggtggagtcctaattagaatgaatcattacagtctacaaaaacacataaatgaccaaagcgccctacaagttactgttggccccagatgaactcaagaggggggggtgaattgagtttataaaataattcgcaatttaaaatcaaattcaaaacaataatatgaagataaaagataaagataacacaatcaattttacgtggaaaacccaattgggaaaaaaatcacgacgtccaaattggataaccaatccaatggacaactccactatgataattttgtgtacaagagttcctagtatcctagtttcctagtctacccttacacaacaattatcccagctggtatccttgtttcccagcaaaaagctctcgtctcaattcaccaagaatagagacagactggtatccttgtttcccagccaaaagtcgcacgtctcaattcaccaagaacagagacaaaaactggtatcctagtttcccagttgcgacctcttccaaagtcaagaagaagaatacaattaaaatagttacctttacgcttctattccttaagcaaataggtacctttaaatcctgatggagagttgaagaatcaaacttgccaaatgcttctatatgatctcaccacaactctctcaatgatgcaaacacaaactctctgaaactctaatattatttggaatggaattgcatgctataaacacaagagtatgtttctatttatactaatttaatgatatgattttatccaatgaattcctaaaagatattctattttatcttaaaaatattttatcttatcatgcaatgcaatcttaaagatattctattatattatccaatgtaatcttaaaatattatatcttatttttgaatgcaatattaaaaatattctatcctatttttgaatgcaatcttaaagataaatgtattggcaatatcaatcttctaatctccttacataatatctaaaaaaataaatagaaacaaatcttcttaattttatgtcatcttgaatgatattaatcttcaggattcttcacttaatcttatcttcaaataatcttatcaattatgctgagatagaaacaaatcttcttaattccatgtcatcttgaatgatatcactcttcaggattcttcacttaatcttatcttcaaataatcttatcaattatgctgatcttcataaattcaaaatatcaataacttcaaaatatcaaatccaaaatattagtaacttcaaaatatcaaataattattatcattgcaattaatctaataatgtgacattcattatttgttatcatcaaaactttataaatcgttttatgcataaagggttcaacaaatatccaacagttaccatctgacaatcacaattcacaacgaaatgatttggttgggttgtgatttcaaatgcattcaaatgggaacaagcaacgtagaaggtgcagcacattcatgatgtgaatgaaaatcatagaatcccaagtaaggccattaatctagaatgttactctaatagatttactcgatcaggagacccaagttttggaggtgagcaagatttattttacagtgaattctgtttaggaagatgtaaatgagaaagtactgaaaactacatgaaaatataactttattacaatgcaagcatcatacatatgcaactattatttatttataacattagcccacctctattcattcttggactaaggaatttattcacatggatattgcttgtagtctggcctcaagtggcatagctatcacatccatatatctgaagtgcagtcaccaccaggatatctcatctcatgtgcaaggcagggaccttgaggctcagctccaaagtcaacaaagaagttagggttaattttcagacctccattttcagtatcaacatcaatctgtaacatgtgggatcctttctctacaagctctggataaaattgtttatcccatgcactgaagagtgagtttgtaacatatagccgcttaccatccgaactcaacagaatcatctgagggccagctctcaacttatttccctgaaaattacaattttgatctcttcaccttagaccacaaaaaggtcaaaattataagtgtaattatttaccacgtttaagcatcacataagataaaatacaaaagtgaccaaaaatttaaggcaccaatgtaatgcacgtctattatatctactacatctaagaaccaatcaactccaaacatgtgagatgcaagaagcataacactagaatcactaattcaaaagttaaactgcactaaccaggatgtctggaacatcagattgccaagtattaccatcttcagttatagctactatagggctttctttctgaagtagtcccccaacccatacttggccagtcagtacaggatttttagggccctcaatgttatattgtcttatatcaccatgaagccaattcacaaagtacagaaaccgatcattgagagatatcagaaaatcagttataagcccaggcatttctggaagaatccagttttgcactttcaatggtttcactgatattgcaacctgcaaagtcagtctagtctgtaagtattattgatcattatgcgttggttgaagctgcacaaacactaaccacacgactatacaaaatcagtatggatatctatgaatagagtagattatgaagaaaattatatagtctctattatttcatatgagcaccgatacaatatatagaaaaaatgaagaaaaaaaaaggaaatgataaataggatatttcaagaactaggaatcccaaaattacaggaatgaaataaaaatagaatagctgaatgtaaaccttccgattaacgagatgttgtgattctcctataatttagggattaatttttgactatatactttttatgtacctcatgactccatgattcatcctcagtcttgaaaaagcgtaccatgttacttgacaatgcacacccaacgaaacctgtatctttagaaggatcatgcagaaaccttacctgcatttaggacaagttgcttacaaattatctcacctttcacataatacttcacaagaacaagctagagagaaaaaatgtagcaaaggacaaacatatttatgattaaatcacaagtacattaacataatagcttcaattacagcaaaaaaaaaaaaaaaaaaaaacataaagtgcattataactggtggaaataattccagatttatatattaaacaatgtacctcccagggtagaagccctgactcaccaaggtccaatgtttgtctcagttcaccccagtccagctgtatacatgtagatgcctcccttaaagaccatcagagacatgctgtaaattaaaacccaagacgtgacacaaattccaatccgtaaaaaattaacacaccacatttgaattacaaattccaatacgtaaaatatagatttattatatagtatgtcgactgcctcgaaggaatactaattacgttaattatactaagattcaagtccagtaactcagtcgaatgtgaaacttcactaattcagagctttagaaaacctccaatttgtttaccacatagagtagtttcaaacattttcttaaatcaattgtatccacattggaataaaatcatcttttattttacttgtctctttttcactctcttcaattgaaaaatacacgtcgactaagaaaaaatagcagaagaaaaaaatattcttacttaaaagtgatatttacgcaccaatatattattttttaattactgaaactgaaaataaaacaagtaaagaagacaaatgttttgaatcaatctatatgatactatgcaaattttaggagttcatttcagtactccctccaaagaagagagactcttaccttttttttctttcttttggaatttaacattaattttataaattcagtaccccctccagagaagagagtctctaggcaccacaattaagtaggattgcaaactggacctagagaatattgtggtgttcatggattgtcgaccctccctctccattaaaaggattaatgtttgttgatgttacaggaccttccaatatcctacttctatggttgaatggtcgatttggtccaaaaaagtgtacagcagtttcaagttagtccttgaattcaaataaattgaaataaagcccttgaagatagcttgtcttttacatttgtcctttcaggactaaattgcattttaatgataacatgtaaatgcaaagacctatttgaaacgaaggatgaatgtgagagaggaaagctactttcgaagactttatttttagtttattaacatactaacttgaagccgtcatatacttttaagaaccaaattgactattctgcctacttctgattgaattcttagttttttggggcgttagcctttttttatctaaaaaaacttaaaagttaacgcatgatgttttttattttttattttcaaacggcaaatgcattttatcactttcaaaataaaaggcaaacattttcaattacaagcaatttaacttcaattttagtaaacaatcatcttagttcgagccaaattttctaaatacatcaacgtcaatgtattgttgagaacagtatcttccattctgtaagataacagaaaagaaaagaaaaaaaattgccaaccaaggattaggactttaaggtcactgtcttaatatacggtcaatgatctcttgtgtttgatgatgccattggcattcaataggttacatgtatagattgtctatttgctccctgtattgagccacaactctatctcttcgaattttcatgatgggtgtcattagaccattatcaatctgtcattggagaaaaggatttaccaaatatgtcagttttgtgatgtgaacaacatacaagatactactgctttgaattccaaatctaaccttgaagggttcttttacaagaaggattggtccaatttgaaatggagattctgatgtcctgcatgatgaatagttcaattatagaatacatttaatttgtttatcattcagtgactccaccataacagtgtccaaaactagtttactccctttaattgtcataaaatttaagtaaagctaattaaccaatagagtcaaacactgtccttcccccagaaacagaaaaacactagcacaccagagatatctgaacaaggcataaacttttttccggcattcattacaagaaacagaaataaataagtcttaccaggtctttaattctttatatatcaggctcgtcactttttccttactgacatctgaactgttggaatctataattgacaacttccttgctaccttcaaaacttcttctttgttaggaacgattacagttcctagacgtcgcttatcctataagttacagttattaccaagaagtataatcactacattttgtactatctgaagtacattttatatataatgcttgagttagctatcagaaattgaaagaattcaagaattcacctggccaacaacaacaatttgttgaattatgctactcattttcaccttctcttattataacaagtggttaatactcaaggaacttctatgatttccaaaggtgagatcaaaccagcgtaaaaacaaggttgagcaaaactcaacaacttaataaacaaattcaagaacaggatcttgtcttactcgttcgtgttttaagaacaacttgtttgttactcatttataatattgtttattattcattattgcatgtaacacatgttgaacaccgtagaattgtactttacatagtacgtgcaaatgcaatacaattatacaaagatatatatatacaatgtatacatacattaaaatgaaaatttgagacatattatgggttgggaagggggataaatatcggggagatttacacttgtagtcaaataagtgaattggacaccacaccttaacccaaaatcttaaagctcaagtttatgattcttctactcacttatatggtgttaaacttttctatttctataagatgtgagactttaactcggacttatactctaacatttatgaagtaaaatcaattgatatccttcacaatgtgctaaaaaactaattttattgaacattaaaaaagatatttaaaaagaaaaaacgtggcaaagtaggtggcgagggccacgtgttttaagaatttttttattagtgtaaattataaagaacttttcttcaaataatagaagtatagggagctttcaaatttaacttgttcaggtaaacaccaggttccttttattggcagtgtcgtttgtttcacatctctaatggatgaaaaatatagaaaacgtgcatacaccgacagatagatatacaaattttaagattccatgctaaacagattacattgaactcaatattctactatacctgttgtagatgtcgaagagaactaaattctccaactgttagttactaagcgcagctttgtttggtggtacgtgggtggtaacgaccataaattggaccaatcattagaagatactataacttgtgttaatctttgttagtatatatttaacatttgatttttttattattaaaccatgcaatcatatgttactttagaaatctatatttaatcacataaaatgacaaatgggtaaatataagtatacaaataaatttaaaatttatagtcatagagtattatttaaagtatgattttgaattatttataactgaaatatccgtgataactttttttattttaatttattttgttatgaatatgtagattttaatttaaagcttataaaattctcacaatggctataattccccatcagccccgaaacaaaagggaaaaaaaattgtagttgccttttatggactctggttttgttcagaagcatgagtcaaactgaccacagtatttgggatggttgtagggaaaggtaatgttatgttcaaaattttgagtaaactattattttagtctttaaaattatgagacatcgttataatagttcataaaattttaaaaatattaaataaatcattcaaattaaaattattgtcattttaattaatctacgatatgtacaacttagtattattattataattcctaaattttatattctactatcattatagtccatactttcataacagtgtcctaaaatttcaagaactaaaattgtaatttattcttaaaattttgcaagataagcttgtgggaaaatgtttttattaaaaccaagtggtagttttttttccttctatgctttattctccctacaaatgtctaatttttgctacttttcatttcaactagtttgtggtgtgtgttttttttcagccccaaaccaagacgaatttattaaaagtcatgatcaaagattcaaagagaacaatagcatcatcttccaacaaaggaatcgaaacaaaagcaggagtagagacaagaacacggtgaagttaaattgaaaatactataacataaaaacttaaaaaaaaaaacatttatctgtaaataaatacaagttgtctctggaaaaaaaaatgcaagtcattaaggtaaactacaataacaacactattaacattagcggaacgtttgctaggagaagaatttttttcatattcaagaatgaataatatttgattgatattcaatatttttgtggatatttaaataagtttactgaaaatcaaataattatgtaatgttttatcaattactttaattatttacaataataaataatctaataaaaccaatattatatttttacagtattcaaagaaaattttaactcaagaaaataagattttcatagaaaactaactaacattttttggaaaatttctccctactaaacactcataagggattagtcaagtaaaaaatataaaattaatttaatggttgaaaacggagctttaagggtgaagggagaaaaaaaaagaagatgttacatatttaaatctttctcactacatttttaacaaaattaacatttgctaataaaaaaatattaataaagtgaaataagatgaagcttatcttatgataggtagggatgaaaatggatataagtggtctttgacttgacctagtttgtttattataaaagttaaattaagattttttgaaaagtctatttaaataaaaatgtcagactcaaactttaaaaaaagctagttaaacctatcaaacggacctatttataagacaatataattcaagagacccttgcattactctttctctctatcagtgttacttgtggttaggggtggaactttttaattaaaaaggccaagttataggttttatataagagaaacatatctattatgttattttttatttttaattatttatttttatttaatcagaatttgaatttgtatacaagttttcatgccagattagatctttatgcaggacacgttcaaactttaataacttatttttaatatgtaataaattaggcttaaacttaatgataataatgcgggtcagattcatgactgtcaaagtctgacctgacctacttccacccataataataggtttcatgttcaaattttcaattgtttctttcaaataagataaatataagtttttctcaaatattctgataaatttgttatgccatgaattaaggttgattctaataacaatttaaacaatttagccataataaaatagtgacatattaatctatcgtacttttttactttcgaaaattaaattcaaaagttcattaactgatttgatagtattactgtatcaaacagttttagggactatttaggctgtgtagatatgattcctcttaggtgagggactaaatagcaaatgtaagtgatttttacctagacctattaaaaatagtaaaacgccaccaggaaagtagtctcgccgccgcattgcatccctaggggcacgacaatagtaatcattgattgtagtttataaagatacacacgtgctttcattttatttccgtagcattttactctgcagcagcagcagccaacacccatggcgtcgttttctgccgccgtcgctcagttctcccgtgtttcacccactcacactctgctccactctcactctcacgataggctcttccattctcaatgccgcccccctttcttcctctcgcgcccttcccattcactccggtacgttcctatcgactactaggtttcgcatatcaacgtcgtttcctcgatccttttcgcatttggttttagatcaaattacaccaatgcttttgtagctccatgtctcgaattttctatctttgaccacacattcaacagctagtcactcgctattgtgttttacttgaacattccttattggatgatgcgactttactatttttaattctttttttgtttttgctcttaaaagaaaaataataagccgagaagagagagcgaatgtcagttatgaaacgtgatgtttgattattaagtttatcagctgaatgaggaatttgagggtatattccctcagtttgaataataagattataagagcaaattaacaaaagttataaacatcgtttgtttggcagatacgttctaaataagcttttaagtgattggttattccacacacagtatattctctactctccccttttttttttgtttatttatcctttgcagagcataaactgttttctcggaattttggcagtatatacgtgtttaaatgatattctccccatgaaattaattggatttttgtgttttgctatatactgattctcaggaagggtcttactttaccacgaggaagggaggcaccaagtacgacagtacgttcttcatttacaggttgcgacttacttttatgatagaacatgtcctttttgttttgaaatagacaaatatagtaacttatgtttttttctttatttgctagcagatgtttcactgagtgtgtccttggaggaaaaacaactacccaaaggagaaacttggtctgttcacaaatttggtggaacctgtgtgggaacctctcaaagaataaaaaatgctgctgacataattcttaaggatgattcggagaggaaattggtggttgtctctgcaatgtcaaaggtgacagatatgatgtatgaccttatccacaaggctcaatcacgcgatgagtcttatatagctgcattggatgctgttttggagaagcacagtgcaactgcacatgacatacttgatggagataatcttgctagtttcttgtctaaattgcatcatgatattagtaaccttaaggcaatgcttcgtgcaatatacataggttataagctcatcaactctctctttctctttgatactctgttctgttttctcttgttcagttatatctatttcttttataaatcctcatttgaacctaggaagttatcttcatgttgtccttgtttattataagtcggtatttatcgctttcactttccggtgttgttttcacattgtaatagtattgatgttgatgtatattgcactagctatgtcttggttgctattttatagtattgatcattgcttatgtcttggacactagtatgacaataataataatatatggtactttttggtcattaatatcacatgacagattagatgtatttcatggaaaatactattagtcacatgatctgtacttctgtagtatacatgtaattgatcatatgacctgtagtatacatgctactggttagatgacctgtagtatacatgctactggttagatgacctgtagtacacatgcaattagtcacatcacctgtattatgcatgtttcttcatgtgtcaaaaatcaaagtatatataaatgttcaccagctttgactttattttgtttggggttcaacatagatcttaacagaaactagtcactgcactatgcatcctcgttcagttgagatctttaaaccaatcaagttttatttggttggtgaccaagagatatatacaagggagataaggagtgaaaatagaaaagttaaatttgctgaccatgttgtttcgttggaaccatttgtcagggttggaacacaagtttgaaatgggggcagagaggaggtggcagctgaatgtgtttcttgagtgaattctagagttgaagataacccttagattaccaccatggtgcttttttgtcctgcatgcgatggtagtataagacctaaagtgacttgcgaaaaggattggtgtaataattacttgaagaattagagttgaaactgtgttcttatcaggaattagatgattcaataagatattagtttcattaaacttcatttatagtaagatttacgataaggacatcccttgtatccatatatttgcaatcagtcccgttctgtagaatcatggaaagaatttaattctaaacttaagctttgaagacaaactttggaataaaatgtttttcacttgagtaggagcagaaaggaatatatatgcattgcaatttttgcaacaaaaggaaaatgatttagaagtgaaaattgtagaaaatatcttaccacacatttctaagtttaagcatataggatcaatattacaaaatgatgaggaagttaatgaacaagtcacacgcaagatataagctgggtggttaagattgagaaaggcttctgttgtagactgccttgccttaaatccaaattaagtcaaacaattccagtctcttctcttagtctatgctcaatcaccttttcccataatttcatagtgtgatctctgtaaacaccttttccacaacaaaaagtgatatttagttttccataaacattattgcttaaaatgaatttgggttaaggaattgcattttaagcctgactaacatttttaatatcttgcagctggtcatgcaacagagtcctttacagattttgttgtgggacatggagaattatggtctgctcagatgttgtctctagttattacgaaggtatggtgtgctgttttatttagaaagatatgctttttccccctttatatgaatttagctcattgcatcatgcttctgttccggttctacagaatggggctgattgcaaatggatggatacaagggatgtccttatagtaaatcctactggttctaatcaagttgatcctgactatttggaatctgagcaaagacttgaaaaatggtactctttgaatccatgtaaggtaatcattgctactggattcattgcaagcacacctcaaaacattcctaccacactgaagagagatggaagtgacttctcagcagcaattatgggtgctctatttaaggctcgtcaggtcacaatttggacagatgttgatggtgtgtatagtgcagatcctagaaaaggtttgttatgctttgtactttgtgtctgagttaaacaatgagtggactggatcatgagaattggtttttagtaaccagatggagttctagctctgacatattgatgatgcttttgtcttgtgtttgacttccgtaacatgaagttttgattaaatataaacaattatattttctgcagttagtgaggctgtgattttgaagacactgtcttatcaagaggcatgggaaatggtgagttagatgctggaaagcctcaatgctccttctgctcataaaattaaggagattaacttccaaattgtctgttgtacagtcttattttggtgcaaatgtcttgcatccccgcacaattattcctgtgatgcgatatggcatacccattatgataaggaacattttcaacctttctgctcctggaacaaagatctgccatccttctgttaatgatcatgaagatatgcagaacctgcaaaattttgtcaaaggatttgcaaccatagacaacttggcacttgtaaatgttgaggggtgagtcatgaattgcagttgtgttacattatgaatagttggcattttttgctgcatgaggatttgtatttaatttaaggttttctttaaccaatattaattgtccaagttgtagattccaatgaatttttctctgttgcttttttgcagaactggaatggctggtgttccaggtactgccagtgctatttttggtgcagtaaaagatgttggagctaatgttatcatgatatctcaggtgcacttataacttttttcaattttctagttgttcacgttgatatataagaaatggcattaatcagtaacagtatttgtgtaggctagtagtgagcattctgtgtgttttgctgtgcccgagaaagaggtaaaagcagttgctgaggcattgcaatctagatttcgtcaagctttggataatgggcgtctttctcaggtgctaaatccaattcttctaaaaccaaatgcatgtttctgttcaattgttaagacttgactcacttgagtgatatcagactgaagatttatcattctacattttgtggatttaaaaactggatgaaacatttgagtgccatgcatggttttaaattgctgttgcgatgtggttgtcatgactcatgagtcaaaaaacttttatgttgcggctgcaactgtggtagcagaccgcaatttaaaaccatggtgccgtgctcttaatttttttgaggtgttgtattatcttttctatgtaatttgtcttcattgcgtaagtgttttaattttcgtcttaatattaattaacaacaagggcatattagggttaaaataaatatgcaagctacagtccacttattatgatctagaacagtggaagcaaacatcagtgatgcagatatcaacagttgggactaagactattatttttggcactagattgatataaatatcaaggattactataaaatgtcaagcaaaaggatccattgggaacttctttaaagtgccaaagatgaaggctgaaggacatcaaataacactaaggcttgagccttgagtcttccaggaacaatagatcattatgcccgtagattaacctaagttaattaggatcggtggtagatgaacccaataataaatcagaaataagacaaagaacgcgaaagggagaggggaagaaaaagtagaaaaaagacaaaagagaggaaaaataaactaaaataaaagaggagtgaaaggaggaggaaagaagaggaaaagaactaaaaaagggaatgactggaacatagaactactaatgggtttaagtttgataatcaaaaggaaatgcagtctcttggaatatactcctgtcctcttcctcacaagatagttggatgtgaaagttgtgttaaatggaatgcttcttcttcgtcttctttttccccatcagtttgtgcttatttcttttgtttgttaactatcatgaagtagaaacttaaaaaccgagtaatttcatttcttctgtttatattagtatatgtgactgatgatgttaaaatttaaagcttgctatttaattacctttattgcattaaaaaaagttatgtataatctctcaggttgcagtcattccaaattgtagcattctggctgctgttggccagaaaatggcaagcactcctggtgttagtgcctcccttttcaatgccttggctaaggttaggaaattatgtttaagatattgcttaggttagaaatttttgcttattttgttatgtattttcgcttgttttatgttctagtttgttttcataaacaggccaatataaatgtccgtgctatagcgcaaggttgttctgagtacaatattactgttgttgttaagcgagaggattgtataaaggctttacgagctgtccatgccagattttatctctcaagaaccagcatagcaatgggcattattggacctggattaattgggagcacactacttgaccagctaagggatcaggtgcagtttctgtagacgattttgtatgcatgaatagtttttttgggttttaccttgtttatgttttggtgtgtaatttggcttttattatccttgctgtgaaattgactatttttttcaaatttaaaatgccacttcaaggaaataatgcctataattgaagaataatgtttagtttttgttgtatggttcttccaaggttcttatctaattgatatcagatatttccactgtgtttctcaactacaaatgagtgacatgtgtgttgatgctggcattgtagtttttgatagggactagttaaagggttattgcgcagcctgcccatgtgggcacggggctgggaagcaagatggaatgttaggatccaattgcaaggtatgagacttgagtctcatatttgaagtttaggatgtataagactgttgactctccaaactacaatgactcgcttttgtggtgtagatctcccaaggttcttatcattatacaagatagagaaaattcagatgattgctttcaaaacaagtaattgaaagaaaaagaatgagaaattgtaaactaggacttaaatagtaaagcacagttacaattggcttaactgaagtttagttagtcttcttaatggctgtagacagctgaaattcctattgtaagcttgcagaacaaggtagctctagtatataaactcatcttcaatcagatagtaataagtgattcattaatcaataacagaaaatagattcagactctctctatctctagaattttattaaatattaataggtttcttatatggggtatttacttgtctaactctaacattgttatgcataaaaactataaaaagaaaactacgtacttcattgcccagaggctccctcactatgcgaaggtaagggagagggatattgtacgcagctttacccttgcatatgcaaagagactgtttctggattcgaacctatgaccaacaagtcgccaaggcacaactttccggattctaacattgttatgcattgggagattttttttttatagagatttgatacctgacaagctttttacatttccatgttaaaatatgttcctggtatactatagtggggtaacttcattttatcatgttaacatactataattgaaatatgtggcaaattcacatgacaattcttttaatgcaggcctcaaccctgaaagaagaattcaacattgatttgcgtgtaatgggcatacttggttcaaagtcaatgcttcttagtgatgtgtaagttaaccactctgactgaaatatgtctttgaatgataattaaatttcttgcttgtataactataagaggccttttatgtgagaaagcagacttcattttacacttcactccttttactgtttttggaaagctttattgtttattatatatcatttatgtattgttatttggatgaaagaagattcttatatttttaagtaatccataataacatgattaggtctcctacatagaatggactcaaaatgtaggcaatacctgattgcttttggggagccatgtttcttgatatggatggtttttggacttcctactttggtttgacaactctctcttgctaacaattatgaagttaatctgttggcaagaggaattcattggttaatacagtggtcctggagctacatcaacaaaattcatcctatgatttgttggttatatgtgcattcttgaagttggtttttgttcaatcattatatactattattgctccttgcaggggcattgacttagctagatggagagaacttcgagaggaaagaggagaagtggctaatatagaaaaatttgttcaacatgtacatggaaatcattttataccaaacacagcattagtggactgcacagctgactctgtcattgctggctattactatgactggttgcgcaaaggaatacatgtagtcactccaaataagaaggcaaattcaggaccacttgatcaggtaaagtaatccatattgttcttttgatgtataacatgtttgtgtttgttgttgacttatctcatgtaatcaatgctataagatattttttctgcaagtactcggctgaaaatggaaatttccagacattaatttggattaatttattttctaattttttatttgttttgtttttttataaattaaagaataattcatttaaaggaaagggaaatacacatcatcacattatcaatattagggagtttggataggaagcttttactcttatttctatcatttacttcatacctctatccactggcagctgtctattttttccttttttcttttttaaaatcaaaatatcatcatgtgagtttctgtgtcatttttgcagctatcatatttgctagtaccagagtaattgtaattttattgtccagcagttatatggctgtcactaacctgtagttagctgcgtcagactcagcatagtattcagtttggctaaatttcaaagtgataagctggttattgaagtgcaagctaaagttcactatacaagactatggagccaacaaaattaatgattcaatgcctcatttcagttttaaacaattttctcactcttttctctgtttctctctctaaacccaggttcactggactctgttgactagtggtaccattgttctaacaggaatcatttataagtataagcttgttacatttaaatgttgatgtcaaccagtctgcaacttgttctcttgtcattccattttatttagcaatttggaaatttattgctttatacaccacgtgatgtttcatagtttagttattaacatctacgatcaaatttcatggttagcataaactggaatgctgaacaacagtaggcattggcttgggttcatgcttttctgatagaacaagtactttgaacttgaagacatgttttaataatatttttcataattttgaaagtgttttctttaagcttcagcagttgttgcttcttagtactcatgctagctttttcacatctatgctctctttatccagtatttgaagttaagagctcttcaaaggcaatcctatacacattacttctatgaagcaactgttggagctggtcttccaattgttagcactttacgtggcctccttgaaactggagacaaaatactgcaaattgaaggcatctttaggtttgctttgatgtgttatttctcttttttttgtggattgacactgtcaattctcagatcttgcattcaatctcatttgtccaccctcttgcaattttcccattctaaagccaaaaaaaaaaaaatagaatgttattttgaggattattaatgactatatggcgattattcattaatctcgaccagtcaccatgagtattgcctctgaatctgcagtgggactttgagttacatatttaataactttaaagatggcccggcttttagtgaggtagtttctgaagcaaaggaagcaggttatactgagccagatccaagagatgatctgtctggaacagatgttgccagaaaggtacaatttataatatggtatatgtttaccaaattttgttgtcaaatgttaataaagttcctttatgctgcagacatattttgaatttggatttcgtttaggatttatgagtaggctgtaatttaaatgatctaaaagactatatccaaattaaatatttatatgtttgaggctgatttgatcaaacattttgaagcttgaattcggtttcaggctagaatttaaatttgatatacatctacctatccagttatcaagtatttcgattcatgctcaaatttgatatttttaattgttgacatgctgaaagcatttaatgatttaaaaacacaaatcaaaagttgataatattattaatattcctcttttgtgcctatacacaattgaaattaatattatcaatagtcctctttggtgccaatacacaaattttgttgagcaaatatcctaattttaattttaaatgtagaaataaataaatatattggtaagtattttttaatttatttattgtgaaatccatatttagttgaccaccccattctagaaaatgtttggtggttgttgtaactaatcggaaggcttgcttgtttctgcaactaattggaacatgtaggctaatcacaatgtcgttattggttcatgttagcattttgttgcttcatgtaatctgatttaaattcaacatcctgaagctgctttgactctacaggtgataattcttgctagggagtctggtttaaagctagaactgtctaatattccagttgaaagccttgtgccagaaccactacgagtaagaaccaatttctattgattatgcagtttttagttttaatatttagtattttgattgacatagatgttttgatgattctgtgcaggcttgtgcatcagctcaggagtttatgcaagagctaccaaaatttgatcaggagttcacaaagaaacaagaagatgctgagaatgctggggaagtgagtaaattctaagacagtattaattctatgtgcctttccaaaaaaataagtattaattctatgttaaagtatctaatagaatagttctaccaactgcttcatacatgcataattcatgcatggaatatcttagggtttgttttgtttccatacaaattaaaaaaaaaaaaaaaaaaactgctactttattttcattttcttttatattttcaaagatatgtacaggtaatgttgaaaagggggcattttataatttttagtgataaccgaaaagggaaaaaaaatccttacaaattaggtacccttagtttgttatatatttatttaattctgcatagtacatgacacagaaacatatagtacttatttgagacacagtaggtgggatagaaattttctgattagactgatgacgtaccaaaacgccaaagttttgcatatcaaatcttcaattggttggttaataaagactctctctccaacctgatggaaggatgcctgttacatatttcaagcaacctagatttccatatagaccttgatttcaagtaaaagtatgacaattgatttatgttgggtttgcggtctccagtttgtgtccttgactatatatataaacgtctatttttcatgatgacatctctcgtatatgtatattatgtccattaaatatacgtatatttttcatgtcctccacatacaactctgagattgttatgtttgcactctgaaggtcttgagatacgtgggagtggtggacgtgactaataaaaaaggagtggtagagctgcgaagatacaagaaggatcatccgtttgcacaattgtctgggtcagataacattattgcatttacaacacgaaggtataaggatcagcctctgatagttcgtgggccaggagctggtgctcaagtcacagctggtggaatatttagtgatattttacgacttgcctcatatcttggtgctccatcataactcacaagtttcattctgcaagcataattttctatgtttggtttcgcatccattgcttcgtgacacattatctgaagcaacgaagagttgcttttatgtccaaaacgtgaattttgatcgaaacgtatgatgtcgatggatatccaaacacatgcagatttgtatcatctatttatttatcttgattttctttgtaggttatttgctgcttataacgttgtaatgtaagcttgtttctcttatcttttgtctggaagaataataagggaatggaacagaactccgttacccttttttgtgagttatattgtaaaggaacggaagtaaacagaattattataattttcaacttcgctaactgcctttttaatctatagtaaaaaaaagactgatgatgatgtgcaagtttaatctatagttgagtatcgtatcctccttttgcacgtagtagatgcttgcacttacaatgtaaaaacaaaagagtaattaatttaatcattaaattattgaaagaatattttaaaataattactaaaatatatttaattaactttactgtctttataaatctaaattctgtcgctaatcaataattattaatagtttaatactaaactgaaatatgcacaagtttcatatattttgtacttggttatttagattaagtgcaaatcatggaaagaccatttttattcatggaagttgaactactttttattcttttacttccgtcactccatcagtatttaaaaataaaaaaaattaacaccacattctttgatattcttgtttcctatatattcatattagcaccagactctaacattcttgtttcattttttttttggagcataattgacgcaagtctggttaaatatgtgtttcatttttcatttaatgagtttcattccaaaattagtataatccacataaactttaactaataaaacaaagttgaaaagaatttttttagaggaaagttgaaaagaatattaaaaaatgtagtaccatactttctcctttttgataataatagactgaattataattttgattcccggtttaattttcatattttaaaaaattcccaattcgaatcaaatcctcaattttatataagttttatttaatttattttggtctaattaaattctatatctaatatatttatttaagataccgtcaaaatcagtgtcgttttttggtttctaatatttgacatttgctcttcacagtttgaaatcggtgtcaagtatctatttcatttaaaagcaattattagttgcaatcaagtaacgtttttaatcttaaaaatgaacagtatattccctgagtgacgagttctctttctccaaagaaatgtgctgcatattctcaccaaagaatatactatgttcatagtatgactacaaacaagaacttaaatattttgttgaccaattaagctcatttctacatatcacatccgcttattattcattcaaactgtatggtcctcacagcaattggggtcctcacaaaatacttgccatctgtccatgttaggctcccaaatttgtaatctccatgaaacttttgagttgacaggaaactgacactaaagttaaggattcgtgcatctgagttgaaactcaaagtttgaggttcaactctaacttttatgccatatggaacgttcactagagctttgtagactgcagtaatatttcccacgtttgtcactgttctcattactgttgcagctctcttcaggtttggaactgatatggaaggaaggttgaggttcagtttttggtgttttcctttcttacaactggtggtggtcttggtcactttgctaatggatgtactactgtgacccatggaacataggaattgaacataatcctcagtggtgatatcatatatcagtcctggatccagtgctttgttggggtccacgtgtccacccccaatatcaaaagggtctgctgccttatgtgtggaaccctcttcagatataagacttccatcagttccagtttgagatgctacaatttttaagtgtaacaattaattagatacattggatacagactattatatgtaataatgtaaatatgtaattttaatttgttgatttaatgatttctactgactcacctgttgtaaccaaagctgatcttatggctgcaggtgaccaagttgggtgtttggatttgatgagagctgctattcctgccacatggggacatgacattgaagttccagataggaatgcaaatccactactccttgtagtgccttttggtggaaatgcagccaaaatgtccacacctggtgcagctatgtcaggctacctccatgaatcatcccccaaagtagaagttaatgatgacatcatataattaaaaacggagtaagagcaataaatatttatggtaagttgttgactacaatttacagatcatggcacactagataaacattttttaagcacgctcaaatcaaatttgcctttgttgttataataaagtatgaactatatttaattgcttttgtctcaaaatttccgggaaaaaagtttggtctgattgaataaaaacaaaatcatgtctgcaaatgtggtccagatatacctttagcactgttggagacatgctactgggtcctctagatgagaaagatgcaactcgtggtgatgtacattttccaataacagtctttggaaaacttaggtttgctgttggaaaccttccagataagcataatattaattttaactcaatgaacattttataagccaatgttgtcaatctaagtatattagctcaccttgatcttctaatataggttagtatttgtgtccccgcttcataatctaccttgatacatggaaatgaaccacattgattgagtccatcttcatgatattgtgcatatactagtccaactcctccagcttccttcactgtaagtgctgcagaaacaatgtcctgttgatctgatactgaaaagcatagaacaattttgcctgctgccattgttgcatttagacttccagattgacaatccttgcttgaaaggcagacacgaacagtagatataaaatgtacaggaatttgatataaaaaaaacagtaaaaatgaaagaaaaaaaaagaggtctcacgccaaattatctgatgggtctacagctatgcgttcagaatatgtgagcccaacagatccaagattgtgttttccaatatcaatggactgtccctatataacaataatcacaggtttaaatatgtatctaattctcataaatatgatttcaggtgattttaatcctataaaagtgagtttaatttttatgcagtatcagtgtaaaaatttgtattgtcaacaaatcaaaaattgtttttgatatgatttttgtaaaaatcaacaaactcaacgtacataatattttgcgattgaatgacaataatttttacattgtcaatgcattgacatagattattagaaatggtctttgacattactaaggaggtgacatgaaatacgaataatcatgttacattagtgatcaatgtaagataacatgacttttttgcatgtcacgtcaccacttaataatgacaagaacattttaaagaaagttgattaaaaatttgcaagaactaaaattagtggaaattcttgttgaagaaccaaaaccatgtaaagtcttattttttttaaacatacatatataacacatttaagacagttgtattaagtgttagcatatttgaccgggttgattcaaaaatagttgtagcatacccacacagtgcggttatttccaagggtgatggctgctggaaaggccctatctatggtggtagctccgactgtgatgatccatggtgcagtatttgtaacggtttgagagacaggaccagaatttccagcagaacaaacgactgtgatccccttaaaagttgcatgaaaagaaccaattgctaatgaatcacgttgatcaacataggagaacaaaggaatggaaaagccaagagaaacagttaagacatcaactccatcatgtatagccttatcaaaagctttgaggatatcagcatcagtgcaatctccaattggaaagtcccaacaagccttgtagatagctaagtgtgccaacggtgctcctcctctggctaaaccagaagcaagtcccctataatttgcatttcctacaaagtaacctgctgctgtggaagctgtgtgagtgccatggccaatggcatctcttgctgagagatattcatcagtgttgtttccttggaggaatttcttagtctgatcacttattcctttcatgaaccatctagcacctattatcttcttattgcaattggtggagttgaagtgctttcccccttgacaaattcctttccaccttgatgggatttgtcccattgcttcatcattgaaacttggtgactctggccaaatgccttcaagaaatcatatttgtcattggttacattgccactttccaatgccctgcttagttatttttgttaaaaggataattaactactagtactacctgtgtctatgacacctatgatggttccttcacctaagttgctgtcagagaaagcagtttttgaagtggaatgatggacccccataaagtcccagcttctggtagtatgaagtttatgaatgccatttggaatgacagaaactaccgcaggaaactctgcattacatggtatataatataacttttgaaatgttctaaactgggttaaataacaagcctaattaatgcaaggatcattcatacttgctattgcttctgcttgatattttgtcaatcttgcagcaaaccctgaaaaaccatgcttatagctgtaaagaatcgaattctttgcagctgctttgcttcagaacaaaaagaaaacacttaacagttatttttttttcttgactcttattaaagtaatagaatatcagctccattagaaaatgagtatgtgagggacacaggccataccttcctaggagtgatgataacattttgtggtgatacattttagtagtgtgtggattttgatatatcttatctcccatgtatacaatgtgcacctagaagcatttatttaataattgattgtgctcaatgacatgtatttacatgtataccaaagcagaactagaaacttaagttgcactcacagagcttgtttcagaagagttgaccagagagtcttgcagtaagagaagagcagaagcaataagcaattgggcctttcttgaccatctccagtttcttgaattagtatccattatcagattatctaataggaggagagtttcaaaggctttccaaatgcataaaaacatacaaagtatgtatgatgcatataatgtaactttttgaaaataagaaaagttgggagtcctttccttttgtgcagtgcactttttaattttttggcccaatcggatgaaaagtatgcacaaatatcttcatcatcagcgagtgttggggaggaatatgtgccagttagtatactgcttttatttttatggctaaagtatactttctcttgtcttatttttgtttgtttcaatttagtctcttaagtttaaaaagtttcacttctgtattttaaatatttatgttagatcaaattggttatttcatcagttttgttatacaaattaatgatgttaattttggcctatttgctaaatgtccatatgatgtcttacagttagccaatgtcaaagtttttaaactcctaatccgtctgtctaaaaaaattaaattcctagtccgagttagcactcattgaaggagacaaatctctctcattagtacctttttttcataggactcaaatcaaaaccttaaaaagaatcaagctagagtccacttggaataacaggcattggtagtatacttctttaatttgagtgattaaattaagcaatcaagaaaatcacacaaaaaaagagttagacattaatgccagagatattaatcacagtttgatctgattgcttatacatctctaatcttttgtttgtaaaattcaactctagctatcaatgctttttcggggtatagtgaaatgatgcagatcataaagtggtgtagtaatgtagtccaaaacccatcatcatcccacgattattgaaaccttttctttttctaaactttgagtcccatcttttgcttttaagtcatcaatgggactggactgtagccagtcttttctaatgcaaaaggaaaaggggaaaaaaagcagtttcttgagtgtttttagtgttgtcttccaatcaaaattagaattttacctctgtaaaccgaaacttgcattaaatgttaacataaaacaaggagatggaactcatattatgattgaaaaataatgtcaaaagccatctaagaaactgcatcttaagttttatacaaagcaaaattgccggagagaaaattctaagcatagcaaatagcaaaaaatagcttgagtaatctcaataaaattggctgatttggatcctgaccatgaaaaataactatatattaaataataaagagaaatacagcttaaaaaatttcgaaccgttggatgaggattgcagggtgctgcagttacttttggactgcagagatctggtccctatttggacccccttcaaaagaaaaataaataaagtacacgagtatgacaattttgaaatttacggttgcagttttgcatgatctgtgaatggatcggcctttcatttacaaccaaaaaattcagaggataaatttccttctttttctcttttcatgttgtacatctcaaaatggtacatgaataacataatactttattattttctataccgaaatgcaatgcacgacattttccttgaaattggattgcttagaatcagatagcaaatgcaagaagaatctatgccgtttttttcccactttaaaaagttaataaaatactataagcttataaaacttgggtcattggaatgaatgcagaggctgcaatcaaactttaagtcatgtttgcctacacagttcaactttaagtcaaataaatgactctgggagtaaattacaatatgcatcaaacttttatgtgacttacgtaacatcaatcaataccatttatttgttttctactttctcttaattggagtagcccaagcaataatatatatgtaaaaaataaaaagttgcacgagtaatatactagctgctttggaaattgctcctctttgtgaagaataacacctttctgagctccactttctctatacctttatcaattttcaccaatgtcattttcgcatggaatctttccttccaataatggaataggtgatttacagctggattacaacattttccaatccaactagttactgaaagttcttgcaccaaattctctaatgcataataacttgctaactacaacttcaacaaagagtatttttggaaagagacgaggagggtttataaactagtttgaccaaataccgttagcatatatgatctcatttgattcaattaaaaactaaatattaaaattgtaatatattatttatcttgaaatttattgattattatattttttttatctataaagttctataatattgtgaatttttctttttcaattttattttcacaaattttgctcttccacaatttttttcacggattgatcatatttattatcttataatttatttgtggtaattatttaaatttatttcttctcctcaaagtcaatagacgttaattatcttatttatgatgatttatttttgacgtttcacccctttttctttaaaaaaaaaaaagtaatttaagtgtattgatgagtttcacccctttgtaaaaaaaaggtattaaaatgtattaatgacacgtttatgacatattgacatcttcctctctcctctctgcttcatcccatcagtgtttttaagaaacatggatttgtaatattttaatataaaaaaattgaataataataattcctcctcttacttattaaataaagaaagtatttgaaagtttttaaagttttaaaacattaaatatctttatttttatttaatatttttcattaagtattagaaagattttcaagacatttgtattttaaaacttgttcgtaggaacaattgcactgcttaaaaaaatgtcttttaaaaattactttcctactcttgttttggatcttatgatactttcataaataaaacattgttttatctcatacaacatgtaattgataaatgctgacattttatgaatttttttataaaataaatctatttttgaaagtttaacattttttttaaaaaaaatactatactgaaaacaaagtttaaaaattatattgaaaacaattttttaaattaaaaaataatttcaatttaaaacaattaaacactcaagaaatattgtttagctttgtcagatgccaagaaagaaatagtagaacaaaaatatagctttctcctagtaaaataaaatcatatcaactattaaaaaaatcatatttatcaaatctatacaatttcactgtatttaattttttaaagtgagtaatttatgtttctttaccttcagtttcattgttttaaaaattcaatcgttcataaatgcaatatttttcacaccaaacgtaaacgtaaaacatattgttttgcaataattcgtttataaataacaaaacataacatagccatacaattcaagaatcgaagcttgtatttacattttctaaaatggctggttcaaccatcaagattcttagcatagttttgttccttgtctgtcatttctcaaggtaaatgctttcttctattgtatgaaacataatttttttatatactgttgttagtaatttctccatatatcatgatatcaggctatatagtcaatgttctttgaaagatctcactaatttccaacaagaaataaagtgcaaggaaaacaagaatggagtgtgactatcatcaataagtgtccgtgtgttcaaaagaatgtgatattaaattgtaaaggatttcaatccgttggatccgaaaagccttcacttttgaaggtcttgcacaatgtttgtcttgttaatggtggtcaaaccatatatggaattcctgtcaaatttagatatgcttcggaccaaccatttccattaaatctcatttcttcggagatttcttgttcttaaatgtagatccaagaagttttctcttacaaaccttgatgccatttactatagcttgatttgtaggcattataaatgcagaataaaacattgattcttgctatatgttgcatttgtttgtcaattcctttttgtcattcttttaattcctgtcatttttttttcacttgtattgatggctttagtttgaaatcaataataaggcctctcaaacgaaaaatgaactaagttcattagtcaaaccattgaatcattgctcctaaaaagaaaaagaaaaaataacaattgaatcattgaaaatagataaattacgatcattctaaaattaaaggaaaatttcataagttaactattttctattagacttaaatatactcattgtaatttattcgatattttgttttagtctttgtatcttttttataaaaaattgcccatggaattcagctttgatacacagacacgcgatgaagcagctgaattttttaccctccatcgtactattccttcgttgatatcattagcggttgttaatatatatatatatatatatatatatatatatatatatcaattaacttctgctatgataacaatacactaagtggtgatattaaaagagacacaaaccctattttatatggtggaaacagggaacatagtccacccaataatattgcaattgaaatttggaggatccatggaacctccactgaccaccctaagcacatgacactccacacttgttatgctaacctggtgttcacgttcttataaaaaccagcaggcacaataaaataaaaggtaacgaagtaattatctaacaattgcaattttctttctttatgattttttggggtcaattctctttcatatataattgaatctcaattatcattaccaattcaattattttcaactgctcaatctgccctatatttttgccaataggtaaaaaaaagcatctagaatgtggtgggcaacttaacatggatacggcatacgtaaccacaataaagaagacagaaatcagtaacacataacatgtgctttgttgcgaaagttatcatccatctactgactgagctttgaatcaccatatgtgcgttcacgtattgtgtaggctctcatcatgtgaaattaaaatcaccacatcacgacccaaattttaagattatatccattttcaaaaaattaaatttgttcagtatatcaatgcaattatgtattttcttttaaaaaaaatccctttatgtctctttctatcgccaccaattagatgattgttcaagtggtgcttcctcctccacgaaaggtaaggtaagaaggcttgatttctctccttccaaaatggaggtatagaaccttagctagatttaccaacagtgttaaaggatttaaattttgtaacaactatttacttaaagactatctaaccacctcatccccaactcaattgcctaaacaattttgtagatttcgttatcgtacaaaatgtttttttttttttttttaagtttcgtaactacaacacatcataaattccgggcaggtggtctcattattcatttgaccagagaacatactgctccatttggtaaatcattatttatttgtaaggtatcgagtggaaatgatttatacacacactagaccttataggtggatggagagttgaaatagatgcataacgggcaaagaagaaagattatgaaacatcaaacatgcgataaatatacttctgattcaaaagggggaaaaaaagaatataatacaattaataaaataataaatatatagactatagtccttctattcctaaaaaaagtagaaacaaaataatcatgctcacgatcagccggatcaggtaacccaaccaataaccatcctttaaaacccatccgtcggcttaaaagaatcaataaagaacgccaaactcagagatccatgtttagttcagatgagtagattttaagaacacaaaaaatgacattttgaaaataataaacaattacaaagaaattggtgatgctaatagatcaaagcagctttacaacctctggttttcttgggtattctcaagcaaaccttccactatcatatggactaagatgcccttggatagttgtctcgtttatcaatttggctaccggcaatccattgaatcaaaagagtctgcaaatcctacaggtttagaggggatgcttgattgggtttgtgagatggaaatgtcattaaatattgaggaagtgccttcattggcttggcagctcagccactttatatatgctctccatggtttcctcatcaggattgagaatttgaccaattgcctttggaatgttttccttgttaattagtaccctacggaaccatgtaaccaagtgagacctttcatctggcacagtatcatccaatgcctttctaccggtgataagttccatcaaaactactccacatgcataaacatccactttggttgtcactcttccagtagctggcaagaaacagagtaacattaaatataatcaaacgaatagagtagactagcactaataaaatgcatctaatcacatccaatgcaacattttaggaagttttatgcttgcaaaagtcttgatgctaaatggatcaaaacaagctcaaaattaactagttttaacaaaagatgtgtcaatgcactgagccaccaaggcaatgggatggaaggataaattccacagcagtgattaattgcgacagagaactaccacctaagctcatgacaatatacagcaatccaagatttgatgcaaaccagagtgttcatcacatcataaaggataattgggagtcagactctgtaaactgtataaatggctcaaaataacttgaggcatcgaccaccaagaactatgcagaaaacccctacccaactgaaaaaaacacgtgaaacaggcaaaatataacattgcaaagaaatagccacaaagaattctgaagtagccatgtatctagggatttagtatcaattactttccctttcaacttttttttttttttatgtgtggttactctattgaactacttaaatttgctgaacaccatcgaagtagtaacctacaactataaccaccaaataagtaaaatatgaatttcacaattaaggcacaattgtacagaactaaaatcaaaggctttctatacctgcatactcaggtgcaagatatccaaatattccagccaaccgtgtcccaacagaatgcttcccatctggtgcatttttaaccaacccaaaatcagcaacctttgctctcatgtcattgactagtagtatgtttgagggttttaagtctctatgaatgaagctttgctgagctaaactgtgcaagtattccaccccccgcactacatccaaagctattactaccctttgtttccaagtccaaggtgcatagccatgcccctgccactcaaacaggtgctgtgttaacgtaccttgaggcatatactcatagaccaaaagcctttcaatgccattgatgcaataccctaaaacagcaaccaaatgtctatacctaactttactaagaactgcaatctctgcttcgaactctttcagtcctttgttccccattgcaacagattccatcctcttgacagcaaatttttgttccatcatgcaactgccccttataaactactccaaacccttccctgcctaaaatgttctcctcgcagaaattattcgtcacttgtcgaagaacttggtttgaaaacgttggaccatctaaagcatgaaggtcactgcgatcaccactgctctggctttgcaactcactgggaacaccaccatatccattagaaacatggacagcatcaggtttaaaacttcctttcccattttcacgaccattaaccctactgaacttcccctgtcgcctgttgacaaaacacttccaagacaaacagcaccactgcaataaaaaacaacacaataacaactacaccagcaatccaacccagcgacaacgaagaactaccctttgcggattcacagccacttccaccagtcgaagaccctgaaggagtagttccatttggtccacctccaggactaagagctttcgcaagcaaagcatttcccagagtcaccaacttcacctttggcgggaacttgggaaccaatccagagaggttgctatcagacaaatcaagagtctgaagctgagacaaagtagtttgattcatttttcaaaaattataattaaataaaataatattaaggagtatacaaaattaaataaagatataactataaagaaaaaattttatatttaaacttaaaataatactacctcttaaaacaataataagttaactgttctaaataataaagtattttaaacttagaattaattcattgaaaatgataggaaaaaaaaaagaaaagaagcagaaaaacaaaataaaaaagagacagatggacaggaaaaatcacagcacagagtcctttaaccacgtaaactgtgatggtctcgtgggcaaagaaaagaagcagatcgaaaaacaacaacaaagaacagcattaattaataatttagcatgaactgcaaaactggtcagaagacgggaatccaacaaaattatttggcaaagaagtgcattaattatcgattctgcaacgccatgccatcaagaaacgccttcagattcctctctgaaggaccaccttccttcgctgcctcccttgccaaacccttccatttctctgcattccttctcaactctccactccccatcacctcttccaaacacttccttatttcttccttttctactatgccatcctcatgatccaccctcactcctatcttccacacatcttctatcagtttcgcgtttgtcttttggtccgaccactgaggaaacgccaccatgggcacccccgaaaccaagctttccatggtcgaattccaaccacagtgcgtcacaaaacaacccacggaaccatgcgacagaacctccacttgagaacaccacttcaccaacttccccttcccttccaattcctctctaaaacacacctcctcctcttccttctcttcctctttcactctaatcacccacaagaacggaaaaccacaacctaacaacgcacctgcaatttcctcagtttgtctcttagacaactcaaagtagctcccaaatgaaacgtaaaccacagacttcttttcctttgagtcaagccactcaacataaccatctgagacttgtaacaagtcaccaccaaaggaagtatcttcagggtccttcccatccaagaacgcagaaggaatcaacggcccgatggggatcacgttgagcttatcaacggccctcaacgcttcttcttccaaagcttcaaaagtatttaccagcaccttagggttagcttccaggtcaagctgtttgatctgctcttcaaacaagggaaagacgaacgacaacaaactcggtttcgactttagtaaaaacgatggcatgtcacggggtgaaagcgaaaacgacaatcccggaagcactattttctctttggtttcgtcgttgatgtaatcagcgtagccgtgaaagtagtggtaaaggatatccagcaccgtggcgggttcgatccagtacatagctgttgggaggttgagtccacgcgccacctgtggggcccacggaacgagtaaggtgtagagtaagcaagtgaaagggtggccctcgttggcgctggagagtatgaggttggacaagaacaccgaggcacggcgcttgagttccgaggcgtagaggttgtaatcggagtcggtgccgcggatggcgtggaagccgtcgtcgtagccgtcggagaagggggcgagggagaggccggggacggtggttgtgttggtcatgcggcggtgcatgtggagagtgatgggaatagtgacacgtgcacccatggcagtgagtcgcttcgcaaactgaaaagcggggtttatttggccttgtccggggtagatgacgaggaggaagcggtggtggagcatggtggcgctggaactggctagttaccctcttttgctgtgaattcacacttagacaaaaatctttttttcattcatatacagcctcattgaccaatttaatgtgctacaataataatatatatgtttttagttattttttctattgttgaggagttgggtattataggcattatcattataatgcttctggaatttttctttaaatcagtattttttttatggtcagttatgttggaaatcgacaatcacacacaaatctaaaaatcgaaaagagaatagggaagagagatatgacacagtattttaccctggttcacccaatgtaggctacgtccagcttgtctgtactataatctcctcaccgccactcgttacaagtcactcggtttacaaggggaatataaataggattaaaaaaaaaaccctaacagtagctattcatgggccctagcccaaactactaataaagtaaaatattacaaagaatcagaggcccccagttggctttctgctgaccccgccaacaagaagggttgtcatctgactgcgaaagatgagccatatccaacaagttatatgctgtggttttgaaagtgaagagtaaatcaagtttaaggattttgatttatcgtgaagaaaatgaatgtagttttattttacaggaaaatgaatcaagatttttttagaataaaaatgaatggagtttaattgctagaagaaaatgttccaaaacatataaaatgcacttatttcatacgtatatggacatccaatgtgaatgcttgtatgtttgactacataagaaaaatgtgaaattcttcgtcatgtcgtttgaaattgaaatacatctcttagacaatttctctgttccacccaagtttttcttcgataattcaaacatcaatgttaaacagttatcaatgactactaaaatacaagaatattatcattaatttcatcattttctatcatatttttttatatttgaaaaaaaaaaaaaaactgttgcatcacatgggatgggatactagtatcaaatatatagagtattatcattacaattataattataacagttggggctgtaagaggtttcgaatagtatgcatgatagaaaccatagattgcatgatcacactgtgttcattatacataaaaaagaattgtgtgacatgacgtttgtggattctaatctcaaaagcatcaaaagctaagtctcaccagctaactgccttcatttaattttgtatgatctacctagtagcttcctgaagagggggaccaccctccaaataaatttcctgctatggctcccccacatgcttcgtgtcatcttaattttgggttaaataattttttttatctctcaactattttagattttaatttttagttcctcttcaaatctgtccattttagtttcttatttattttcattattcagaattaatatatgtgagattgatttttatcctttattcccattccaagatcagtgactaattttgtacaataaaaaaatagacgagagactataaacgaaacaacagttttaagagaaactaaaaataaaaattgaaatagctaagtaaccaacaaaaaacttatttaattaatcttgtttattactttgtatattaagctagcccaactcagtactccctctctcacacaaaataggtcacagataggaacatcccttgcatttcatatcaataaactcaactggcacatagaaagggaaaaaaagtataagtagagatacataatattggataaaaaattagaagtgtttttaacggatttgttattaaaaaattatatttttaataaaaaaattctcaaaaatatttatgacttatattcaaacaagtttataatttttttatgtttttatgatgtaacatgtacaacttattaataataaaaagtaatatttttttattttttagattatttaaatattattttaaaattatgccatttaagttacataaaataattatttaaataatctatacttttaattataataaaacaataacaaattttaattaatttatattaaaataaatttttataataaataaatacatgtaaaattaaatattaaatttatttaaatattaaatttattttaatttataaatttttataatttaaaaaataataactcttcactaatgatacacttaaaataatatttataaaatcaattaaataaaataaatgtcttaaaaatttattaattaaataaccacttgtcacataattgtttattctgaaatttaaaaaaaaaaattcttgatttaaaaatagaaagatgaatttaaaattatagagatgtaatttaacttaataaatatgcctttttttaaccggaaccaaggatatttgatattttttcatcgatggagaatgaataggcccttacaccgtcaatattcctgagatctccttgatgttgtggaaaatatagaagcctttattaagaaaaaaaaattcggtggaaaaggaggctcaacattactacatgtaccattcaatttttttccgaatgcaatttattgcagcggcattcttgagaatttggcaatccatgccattaggaatagtctcaaatctcaattctcaaaaggttaatgtggaaacgtcaagaatattcttaacgattaaccatggtaaaaaaaaatagaatattgtttggtcaaaataaaattatgtgcaataatattttcctcactttagttgacatttctcgcattataataatctgaatcattgatttctctatcacatttactccttcaacaaattttttcaattttaggcaatcccttttaaaatgtcccttctagttacatttgtaacactagttgtttttctgtgttttgtagacttggacttcttcatatgcttatcacgataacatttgtcttatgctcttatgcatttttgtttctccttcacatgaatagagtatttctcatatattagggttattaccaaatgttcttaagaataagacaaagaacacaacagaatacatgttttatcctcatactcaatttttacatctagctttgctagatggttagttgataatctgattgaagacattcatgtgttgttgaagaacgaaaccctcctgcatctttaacacatatagtttctacttaagatatagtttgttcgtcaacgattttgacatgtattgactctccaatttctttcatacctccccttagagatgacaacttcatcacatgataaagaacgtcgtttgccaagcataagcatatggtggttgtcgcaactctctcttacaactcctctcaattcaaaacctccatcttctcaaactttgagtcgcacagtgcctctagaaaaccttgctgtgatttaggtttgatttttgcattttgcatattcataggcgatatataaattttataacaaatttttgttgatgttgataacttttcttgtagttttacaagaatacgtgttttctccttatttaaatttttatctataaaaaaaatatataaattctctcggtcccgagcctaatttttagagtttttcctattaattttaatagaaatttatatttcaacatcattatccaatcctaattaatttgcggaacttgcctcccgattttgtttttagagcgtattagacgtgattcagtttgtgtagcgtagtttgtttgttgggtttcatttactcagactcggtgtgccaaaaaataatattcaatcctactagggcaccttgtgtcagtactcacttgacaactttgctcctgtttcgagccaatgtttggtgtagctagccgtgtaggtttatggcttcagcgaccagattgtggtaaatttattgatttcgttcgatgtcttgttgtggaatggtgtgcttccattttttagcatattgggttactataggtgatgttgtaggcttaaagttgtatctgaatttggggtgtttaagtggtgatgcctctactagactggttttggtgtattggcttgtctttatgtcttggtacttttcttttttggcttgtctcaatttgatggtgctggtagtactcctcgctccgtctctgatatatgatagtagtttatatatatatatagcttaattattttaggtgtcttaggtattgcatttatgtaattttggtctttcatatttcaattgaggaaattaaattcactaaatactttaattgtgcgattttgatttataattgtaatacttaaatgatccaattcgcaaaattgaaaactagaaaacaaaattgcacacctcataaatgcaattacaccttctttaatttattttcactgatgagcaatcctttattttaacaaaaagtaatcattatggtcctgtttgtagaaaagcttattaacagcttctcttatgttataagtgtctttatgaatgtttgggatggtttttataaaaagatcctacgacataagatttttttagcttattttaataagttgtaggagtagcttattagcaagtgcttaggtgttatttttagaagggtcagctttcgaaacccacctttgagtgttccaaattcttatatatatatatatatatatatatatatatatatatatatatatatatatatattcattcccttcaccgtataacatttttagtctttcagcttttcatttttctggctttatctaaaattttgttggctttctttccctagccaaaaacattcacacgggttgtttggttatgtgtaagagaaaaaataaataaaattgagagtaaatatatgaattaaaatagagaaaaagaaatgtgagacatacgttattttttaataatttattcttaaataatattttttctcttcaaccaaacaatcctagagatgaatatatattgaattcttccaaattaattaacacatctactcgtgtgatagatcaagtctataagactatcaaaaaaacaaattgatactttttacaagcattttataatctcaagaaaatgttttaatttattcagctaatttcatgattcaaaagatattcctttcttttagatttattattcttatttttttgtttttactataaaaataggtaaataataatttagtgattttatatttttaatatttgtatggtatacaacgttatttttttatttttttagttacttttaaatgttatttttagtttgattcttaattttttttaaaattgtaaaatgaaacattttataagttcttatacaagaatgtatatccaaatactataaaattatgaaagcacttttcaacatgaatatccaaatagcaacaacttattaaatgttaagcatttgtaacataagctcttatcgaataagatattaattaagttattttttcagactggcccataatctacgaaagatatgcagctttgaattgcagttgtcatgcgagcacttctttattttaaaataaaataaaacgagcgacaagatccgcaattctaattacagtccaaactctgtatctcaatttccgcttcggctgtcgtatacttttaggagggcctttttccaatccctttattctaattgcactctcctaagtttttttttttttttttttatatatatataaaatcttacaaaaatactgctaagtggagggtaagcaacaaattctttaatttatatttaattattagttgaaacttattaaagattattttcatttttgtttagtatcgaattttttttaataaatgttttttatttatcatttacaaatttcaagataactaattattttttttcaattatattcttatttttttatctgatcttcaattaatttacatacatacatgtattatggattatggagtaataatgataaagggtgaaataggaaacctataacttctgtctttgtccctaaatataagaatattatttaaattttttatacaaaaatatccctaattattatagtctataaataatagtaattgctatgaattgtctttttctctatcttgtgaagattagataattgaggaatttaatttttaaaattaaaattcaactactattattctcttctcgtgcaaaataatttagttagtcccaataattttaggaacaattttgaaaaatattagagttacaaataaatctaatggtattaactaaattaataaattttcttaataattatgaattaattataaaagtcttatatttaaggatgaagagaaattattatgtttcttagtttctacataaaaacttttaaagacaaataattaaaaagaacaaagatcatatgagatgaagagagacacattaaatgtggagataaattcaaatttgtgatttctattaaattttaattattagaagagagtgtatttaaaaaacattgtttttaaatctggaaagtaaatttcaaaactatattttaacaaataaaagaaagagaagggaggggtgtactttgcatgctgtgaaagtcccaaagtgacgcctgatcatatctctggctaatgcttttgggcctttattgtggaccagtaacagggactatttagaacaataacaaaataaacccaacatattcataaatataaccaagctatatattagtatatcacttctatctctatttataataaaaatatatactttttataaattattatagaagaattcttaagatatgtataatattaaaaagataatattttttcttcttctttttttttcctaattgagatctaatactagaaaaaaaataggagaaatattgagagatctttaatcttagattaaaatctcaatttaaaatctattattaaagatgctctaagactctatcttaattttattgtgcattaatttttttttactaaaatattctaattcattttattacataattaaatgttgatttgaattgtcttttttctcatttttataaagataggagaagataaatagaatttcaataatattaatattaagaaataaatttaaaaaatgttatatttatataaaaaaaattaacgctaatacctaagtttaacaaactttctttaaatgtataaattaatcaacaaggttttataattagaaacagaggaggtagtataaaacaaaaggcaactgaatagcaaggtaaacatctcgaatagtaacaaatatatatattacaatttatttatatttattattatagtgtatttaacttttttatttcacaagtattgttctttaaattaaatgagaaaggatagaaaaattcagatacgatgaagctatatatgcatttattgtggtcaaacatgatccagaaaagcccttagattcttatccgaagagccgccatcttgcttgacagcttccctggccaaacccttccaacttttcgcattgtttctcaattcttctcctttctttccactccccatcgccacttccaaacgcttgataatttcttccctttctactatcccttcctcgttcacctgtttatccactctcacccccgtcttccacacatcttctgttagcttcgcattagtcttctgttccacccactgaggaaatgcaagcataggaacccccgaagccaagctttccattgtcgaattccaaccacagtgcgtcacaaaacaccccacagaacgatgttgaagaacttccacttgagaacaccaatttactatctttcccttctgttccaactcctctctgcagcttagctcctcttcttttccttcaactagtgacttattttctttttctctaatgacccacaagaaaggacttccacaatctaataacgcacgtgcaagttcttccatttgcttcttgggcaacacgcaaaaactaccaaacgagacataaaccaccgacatctctgccttcgagtccaaccattcgctgcatccatcagagacgcggaagatgtcaccgccaaatgaagtatcagtgggatctttcccgtccaagaaggccgagggaatcaacggcccgatggggatcatgttgaacttatcaacggccctcaaagcctcatgttccaacgcttcaaaggtgttgacaagtattctgggctttgcttgcacgtcaagatcatgaagctgctcttcaaacattgaaaccgcgagagagtcaatagtagggtttgaacccaatagaaatgaaggtaggtcccgtggtgcaagcaataacggcaatcctggcagttcaatggaactcgaggggtctttgattttgcctttgatgtagtcaccgtgttcatgaaagtagaaatagaatatgtcgagtatggtggctggttgagtccacagcaacgccgtcgggaggtgaaacccgcgcgctgcctgagctgcccaaggaaggagcacggtgtggactaaacaagtgaaaggatgaccctcttgcgcgttgaaggcgatgagattggtgacgaattcggagccgcgacgcttgaactcggaggcgtgcagggcgtaatcggtggaggtgtaaccgtcgtcgtagccgtcggagaaagggagaaaggagaggtcagggagggtgggtttgttggtgatgcgacggtgcatgtggacggtggtggaaacagtgacgtgtgcgcccaaactaacgagacgctttgcgaactggaatgcagggtttatgtggccttgtgctgggtacatcacgatgaggaagcggtggcggaacatggtgcgtgatattgtaattgcagcttaatgatttgaaatgattgattttatgttcggaatagacaaaggagaaaactactgcggtgggtggaagaagaagaaaaggtagtgagaactgagaagtgataagaaaaaactgaatgtatatatactgataatcaattaatcatagactacgacttgtcatagtttgtcatttgtgacctttgaggtgacgaatacgtagcggacttcctcaatctatcttcatcccttatcctacattttagtcaataggagtagttgaaaagatagattttctgagaaaaaattcccttcacagccgacacatgtttgttagtggttaaaaattaaaatctttaaactattatatgtaaaattcaataaacaatatatataaaaacatattattgaaaaaataattattaccatatatataattttatgtttgaatttcttttacacaattttttaatgaattcttttacatcagattaagaacaacaataaatatattatttattgaaacaattttattaaaatatttttattattctcaaatgcattactagtaatcattgagtgattaatagtagtggttgaaaaaatggtaagcataatattcaaaattattatatcaatgcaatttatttgacatttattaaatatgtcatttttgatatttatttgttaatttatccgttagttttacagaacattttcaattaaataagtcaacttataaatttttaattaacttttcaacttttaacttataacttacaaatttcagttatcttgtcaatcagtttgtcaaacataatcttacgattttgaaaaaactatgaaattataacattttaatttcaaacatagtcttacagttttaaggaaacctatgaaatcataacatttaaatctcaaaaatggtcttacaattttgaggaaacctataaaatcataacatttaaatttcaaacatggccttgtagttttgaggaaatctattaaatcatagcatttaaatttcaaatatagccttatagtttcgaggaaatctatgaaatcataacatttaaatttcgaacatcctaatcacaaaaaccattgccaatttgtgtcataaaataactatctaggtcagtttttttctttaaaaaaaactcttcatttataatttatatatgaatttatctcaaatagctgcaaatgaggacttttaaaaggtggatattgttcctttgaactcaagcatccttgctcatgcttttttactttataggtgtgacaagtttgttgaattttgaaataaatgaaggagaattaggaagagtgagtagaggaagatgaagatgggataaagtaggggatagacttaatatttttagagagaaaaaaaaaaaaaaaaagagggaaggagagaacgagaggtcaagtcttttacttcttaatttgatcattatatgtttgtcacctttaattataaatcaaactacaatgttttactaaaataatatcataatataattttttattataaatataaaatatattttaaatatgtatttataatataattttatattaatttatttatctattataaattttagttatatgaaaaagtactttcttattgtttattattttcttaactattctgaaaaacaattgataagaaatagggtataataaacaatgaagtcgaaaaaaaaaaaataaagacaaaagattataattctaaaggagactaaaatccccgccaaaaggaatcctttattcccgccatgaaatgcctctcatatccaaccattgcgccaaatttcgcgtatccaactctagcgcgcaaagaccatggacaccgtcccaagctcccgtaagcggaaccacccttctggaacactgacccgcaccagatcacagctctatcatcaccggaaccgctccggtcaactccgcttcgatcctgttcccgcacaggacgaaccctgcgccgaactccttggctttcgccgaatcaattgcaagaaaccgaagcgcgacgacaaggagcttcctcgccctctgaccaaggaccttcgagctaggcgagtttattcccctccgcaatctacaaaccccagtttgatcgaaagcacgtttcccaagggaagcgccgaagcaaccgagagtcccgatttggggcttttttgtgaggctcgggacttcggtggagattgttcggagaaagattgcgagggaaagaacggtggagattgttcggagaaaattgatggtttggatggagcaatgactctacccgactctgagatttgcggtggttcaaattccaaggttaacgaagatgtagggaaactggacgcagaggttcctgtcaaagataccccttctactgggaatgtttcttctctcaagagcaaatctgtaagggtctcacatgttttttaatttattttctttatggttatttatttatgcattttttgggtgaatttcatacacatgtacctggagattgaagccctgaccacacccttaagaggtttctttatgtttattgattaggccttctatccttagttgttagatccaaccttaattatggcgaattatgtaattaggttacatgagttattgtgggtgctctaggttaaaattccagtgaataacacttgtttttaaatattattgtagctttgagaacatggttttattattgtagagttgattgggatctgtttgcaggttctcagaccacgtttccagggaaagttgttcaaggccccgggttcagtcaattacagaaggttgtttccgtttctaaaggataccgtgagagatgattctggtaattattttgtgcggcaaaccccttattttttatttacttcattggttgatgatttagttgggtatgtgtgatgaatgagctaattggtctgataatatcttgtaggtacaccaaaattgggtttttgtcagaaagatgaggagggtagacagggattccaacttcttttgtcatctcaaagtcaagaagagtctaaacaagaacttaagacggatgccaccgcagattatggtgttaaaggtgttgcaagtgatttgcacaatgatgacttgaagcaattgtctagctacgggaataatcttgatcgtgctgaggctagtacggcacaggagtttggtgtcttgaatgaagaatatatacagacaactcctcctgatgctgatatatgtgttaattcagaggtcattgtcaaaccgatagattttaccagagacactcaggaaaatgccggtgaagtgtcttgtctgaaagttgacaaggggaaatattctctcaagagtaaatccgtaagaatctgtccttgtttctaatcttgtttgctaccaatttatgggttagacatttagttactgatctttgctaaactataattataacttagttacataataaaattaggtctcaaaaccataagtgatgaaatattttatgatattatattccaagaaaaaacttttgatgtagtagttagtcggctttctagcatttcatgtgtctgattttttggtaatattaacaatatggttttacatttagttgcaatttaaatatgatttgggatgtccacgcaggtgcctagacaacatttgcaccggaaactttttaaaaccccaggttctatcagctataaaaggttgcttccatttctaatggatcttaccaaagatgactctggtaactatccttgtgtattcaaccactttaataatacaaatttcattagatgttttatgcggatatgaagtagctagttgattttacagatgcatccaaatttgatcatcaagatgaggcaaatatgcatgcaaagagctcccaactccctttgtcatctcaaagtgaagaagcttctatagacgaacataagacaaacagcagtcccatgcatggcacagttgaatctaatggtttggaaaacaatgtattagttaatccttctaatgagctatctcatggcaaccagccaaaattgacaccttcccaagacttgcctgaattgtcaacacaattggacgcaaaagaagtggtttgtggggatttatctgcaccctctgtcagtgaacatacagagaactttgcgattgcttctaaagatgaatgcttgagtgcatcagagcttaatccatgttcagtaatggtggatgattttcactctgctaagaatgttgtgcataatgatggcgtcaaggaagtacagaataagatatccagacaacacaataatgagtcaccacccaaagatcaaaatatgctccatatcaacggtgatgtctctgagcttacatatgtgcatcattcaagtaaagaaaaaggattcactattgcttatgatgaaagcaagcagtttgtgaatctggaggagcatgaatctgtcagcagatttccccctgaatgtcagaccctaagtcaatcggatcccaatgtgctagatgctgaggagaatgtaacaagtttaaatcatgtccgggtttcaaatgatatatttagagctccatctgagaatattacctcagaaaaatctgacatggcaggggatagtggtgacaaagctggaactgtgcagaatggcatagttttatgttcaagaaggccttcaaaaggtagtaataaccaaaatgctagtgaaatcgaaaatggctctgaatccaagatgacgtcggtgaggaccctaaatttatctagtgctaaattatatttccataaaacttgcattaacgaacaacattatgattctacttgccactctcattgatttaactgatacttaatttttttgtccctgtcatgtatttatctgaaatatgtttgattatgtgattttgaaacaggttctcaaacgctgtccgcagcttaaattgttgaaacaggctggatctttaaactacaagagattgcttccatttctattgaataccatgaacgatgattcttgtaagtattggttcttattcttgtggaagatacttgtttagtttagtatctttcaatttttttcttggtcacggcagctgtagttctaaactaaacctttaatacttctaggtgcttcagtaaatgatcattacccaaaacttgcggaatccatggatcaaacacctcttctgccaatttcaacttcaaacttacaactaactcctgtaaatgattcaaatggctgtgttcctatggaacattgtgctggcaattctggtcctcagcaacaaacagggttgcaggcttgtgatttaaacaatgatagttcaagccccaaatctcaaattcctgaataccagtcatctcatgattcatgcaaagtgattctactgcaaaatgaacaggttgtattaaatggactatgcaagccagagagctacactgatacatcaatttctgttcacggaatagacttaccaatcacaaccttggcgcctatgattaacaaagttaccaacagagaagaaaaggcttcacctacctcgtccatgtcattatcagtttactctgaagtaaaaggaaataattctttcctgatgccttctaatgagaagctaccagaaacacacgaatattgtcagagcttgtctcaactgcaagttgtagagcaacctagagtccctgccgttgctttgaaaaaaggaattttaaaaagaaacccaagagggtgcagaggggtttgcacatgtttgaactgtgtttcttttcgccttcacgcagaaagagcatttgaattttctaaaaatcaactgttagatgccgaagaggttgcctataatcttatgaaggaactatttcatctaagaaatatgttagaaagttctgctgataatgtcaacaacaatcctgtttttgatggaagccaggtgagtactaccttgatttgtagttagtctctctaatgtgttaggtagagtttgacatgtgttgcattacctctgttccgttttttttctccatctggtcactggatcattattttatcacctagcaaaacttgttattttgtcaagcttttgatgccctttcagtttgacatgtgaattttatgactgaaaattgtgtctatctcttttaagtcttaatagatattaaattagtgtatcaagatttgttgggaatcgatcaaaagggaaatatatacaagtttttcacatgataaaatcacaggaaactaaaaattgaacatgaaagtattcattcttcacaagtatataatattctgctttgggcttaagaagaaagattgttggtcagttaattttggccatgttctatcttgagggcacattgtattgacagcatcactcagtagctttctttttaaatacatttgagctatgaaaatatatcttcattctcactattatttaattgtttttttccttgtccgtttcataaacttttttggacttaatctagtttaccgttgaacttgtaattccatccttttttcgtgtctgtataggcaaaatcgcaatcaattagcgtaaaaataataggcaaaatgcttaccaaactgaggctttttaccccttgtatgtttcaggtgaaagaagcttgcaggaaagcatgtgcagcagaagaagttgcaaaggaccgtcttagtcagatgcacgatgatcttaatactcattgcagaataacggtatgtgcatggttgttatacaccaataattggttccttcatttgaacaactgttttatttcaagttgttggtgcagagcttgcggccaccaacggttacgtttgcggttcatgttgaagaaaaagtcattcaaccaggcggataattctgtaattgcggtcttaaagcatttatcctctcatcttggaattttttttaggagtgatatcaaatataaattataaatcaggtttagtcttggaaaactaaatatcagagaaatatgttcgtccttttgaaacagcaagaaagtttgagttggagcggacaagaaccttagagattttttttttttttttgtaatttatgttattgtaaatgccttttgttcgcagttatgattcattctaatttgccctatttttttaagttaaataattttttttatttgatctcattttttaaaaagtaatactttttttggtcatgtcattagtatcttcattccactatattaaagattaatttcatctagcttaaaaaattttcacatagtagaaattaaatatgaaattttttgttaaatacgtgtgattaaatactaataatttcttttaaaattaatagaagaataccacaccattgcatgccattacaaaaatatgaataactataaaattgttggaatgattgcagatgtgaaaaaacaaggatttcaagttacttgagttttgaagtaagcttcttagagtgaatattttgatactcataaatttaaggtgtgtttgatttagaaaatagaaatagagattatataaatagaagataaatttttgaattaaaatagaatataaaaaatgtaaatttcacataaaaaagtacaaaaatccttttttattttattttcacccttcaaaataaacacaaccttaaatagagaataaaatgcacaacatatgacactagcttggacaaatgtgaaatttgatgttggattttggtatttttaatattaaccattcataagatctaatgattattcattcttcttacgtaaaaaaaaaagacttaactgtcttttatagattctttaattcctaccaccgtaaataaaagaaaaatataaaaaagtagaaagtgaaaaaagaggagatagaaaactaaataccctaaatttattatatttttcgcatatataatttatcttcgttttgtttttcttatttatattttctcttaaacgcacctaaaataatgaattcctcgtataaccaacaatcacttttattgcatttaagatatttttaggggtctgattctctctctctctctcttcaagaagagggatctctaagtacaatcattggcacaataattgtcgatacaaacaaaattgttagtctgattatgtttggccaaggggataacatttgctcagtcaaggtatgatggatcacttttccggaagataaatgcttctttttttttcagctatgttatttatatactttcttccggttttgaatagtaatcaaaaattaatttacgttaattgagaaaatatgttaatattatttatttttattaattatatttaaaaaataatattttttctaaactgtcctttattgaaatttgatataaaagggtcattagaaatacaatatcaattaaatgaaaaagatgtttgaaggatcatttcattaaatagagtaaaattaattaaaatttatttatattgtggacaatttttttatattcaaaattaggggagtaacatttagataatacagtatattttcaataatattattattttatttcttttaattactttaattattttattttatgcttttccccctttttgtctctttttattgtaaaaatcatatgcagtaattttttttataaaagttatacaagtagaaattttatttttctctttatctttttcgataatattaattaagaagctattcacccctgatttaagtggcttaaataattaaactcctttaatgttgactcgaaagaaagagatttcacataatttctcatgtaatatgtctgcatgcatttgtcttaccctacgattaaggttattttctctctctttatttatttatttgtttgttcttttttgtccaacgatattgggcgctctgcatgttaatataaaatatatgaaaccttttgagcatgcagaatattgatgttttgtttcaatttggattctatcaagtacttctcgccatacaattttaaaattatattcatcaatcttaaatatgtgattgacggatcataaaattatattaaccagcagtaaaaaaatatattatattaaccagtttattactttattaatttaattttatcgtaatcgttaaacgtaaatgtatgtctacattgtctagaaatttttggagaaaaattggaaagagagataccatagaggatcatcaatggtggaaagtgggatagctgatagtagaggatggttcaaaatctcatttgagggaaaaattctctttgggtccatcttattaatacattatttaattgatgaaatgtatacatgcttgggaagagaatatatatatatatatatatatatatatatatatatatatatatatatatatataaccaacaactgtctagttgacaatgatggagttatttaaatatattaagagaaattcaatttctcatatatcttgcatatcaaaaaaaaattatttggaaagacaaaattcaatttaataattttcatatatcaaaattagttttatgactttatgagatatcttactttcaaaaaaaagaatatctatgtatatatatatatatatatatatatatataatgtacgaatgaaattactctaaattattcaggccacccatttaatttccatattctctttagatctcttaccaataatgcacagaataatttttatcccaaatgttaatgtttttatgtgcttaaatttgaatgccccattttgaatcctctcgtttaatcttatttcctgcagccatcttactaattttgaatgcccagggtctacgattttttatgtcaatgtggtatttctgacagttgattattaattattaacattccatacgagcaaagtgacgttgatcagtaccagaactacagtgctattaaacttgactacacctttttattatatgtacagatagaaattgattccaacatgatcaatttcacagggtggacgagctaggatgagactaactgcccatattgacaagaaaattaaagtggtacaaagaatatgatttattattatgaccccttaatatacatatacattagcaactataaaatagaaactaaaaaaaacaaaggaagaaaaaaaagacagaagtcaataaagaatctaagacataataaacatagcatattttacatagacgattcaaatccaataagaaagtggccattctcttcatctcttggaaccttcagcgtctacattcagcaggaagaccttgtgggaatcgcttgagatcactgcagtagttatagatcatgaagtacttctgaacccatctcagtcttcttctgctataagcatcaagctcatttgcctcatattcagcaccagaatttgaaatggaagacctggatgagaactcagtggctttgaaattgcggtagtatgctgtaaagggtgctttggaccaatcagttttcaccaatcctcctctggtggcccagtcatcagcattccagaggctagaatagattctcatgggctggttctttggaaaaggaacaccaagagattcagcattcttgaatacccttattggtgtgttatcaaccaagaatctgcagttaacccaattcatgatttggttaatggattttggtgaaaacttagcatagagataaacaaagttatatttctatgcaatttcagtgaaaacaatttacactttcaaatggtatgacttctagttcaaagataattgatgtcaaagtcaatgaacttaacatatataatgattatggttgattgcaatattagttgatagactatttattaataaacaaaaaattgtattttgaatatttgtttattatcacttacatgatgtgctggggcttccaaatgatagaataagtgtggaagtttctggtggggtcgaaccagagatagaactgttgctccctgttacctttgccttgggtgaagatgtttgtgtggagaatataagggtccccacttaggtttcccaaaaactcgaaatcaatctcatcatgtgttggcccttgggatgacaactgcaccgcagaaaatggaattactatagttattgatatggcctttgtgtgtggtagcagcacaaacaactcgacaaagaaaaggacctcattttggggaattgtgatgtttgttgtttattaacaggaatttaaattgtgtgtatgcataggaatagtatgagtttatcaactaaaaaaagccttagattttttattttttttatcaattcaaaaccagaaagtacattatgataaaagtagttcattaatattacacgagccttttttttttttaatttgtcattagtttatgctatgaaccgaagttttcaatattaaaagttagtaatgttttggactaggtcaaagttagccaccttcccctgtcacgagcgctagttaaattcactgcttaaaaacgaccaagttgattaatgtatacgtcaatgtttgaaacagaaagcagcatggagtgaataaataaagcattagttgttgacaaagtaaaattctgtagtctaacttgtttttgtgggtttgctacaatagcattctcgtgaatgtacagttgagtttgacaaaggttgatgtcttaagtgaagaagcggtcaatagtagtcgtatttgaagacaggattttatcatgttctttcatgaagaatcaattctaaagcaacctaaaagaagaagaagaaaaaacatatacacacatacaaaaaagtctacagtatcactgtattagctcatgaagaaggaaagaaactaataatttgaattagtatatttttcttatggtaaaagcaagggtaaatgagtataccaaaaaaaaagaagataagaaacatgataatagcacaatacaattttttaatttggaaaaaatagaaaatatattgaaatatggacaaaatttaaatacactaaaagtattattctgtgatcagaattagagttttacttcaataatctaatctgtctgttgacatttattacaaacctatattacccaaattatccaggtaaaactgtaattttgattgaaaaataacactaaaagtatcaaaagaaatcatatttaaattgtgtttgaaatttttgtttgtactttgtagtataaaatattgtagtaatgaaattaaataatgtattgcaaatattaatgaacatacgtagtaagcagtgacagtgccagcagagttgccagcaacgagcttgagctgcatatcaatcctcccaaataggtattctttctttgatttgaagccagagccagagactttgtcaagggaaagagatagaagctggccaccattgaatatcttagcacggtcaccaccccatgttagatcaaagtcttggtagaagctaccagcacaggtagcaaccatagtgctaaccattatcccaactagcataagaacatagaatcgaatattgtgagtagaaatagtagccattttggacacaaaaaaaggagagaaattgtgcttcttgtgatgtgagggagtgtgttcaaaagaggggtatatatatatatatatatggaggtggggatttgggtatgagactatggtgggacgcgtgaaggagcaataactggggctggtgggaccaaaagctggtgccagcttagcaagttttgaaagctggtgcctttttgtttggccattggttatacttcaatagattttgagttatggtttttgggtttgtgcacaggatgctagtattattcagtatgggcaatgattgtttccatgatattactcacaaatgaaaaataaataataaaaaaggatttaatcccggaaatataggggtggaccccatttttgtatgatttggaatttcataaaaagagagaaaattaggtgatggatggatgccaactgggtgtgatgtggaagcagaataaagacatgagggtattttaccacttcttagtaccatcaatcatcaattatgcatccacttagatggtgccatgtggcggagttgtactgagttattgcccctaggatattgactaaaccaacacctaaattttcactgttaaataatcttcaagtttgtgacatatagatatacatattctttgatgttggagttaaaattcaaaaaaaatagtcacaagattgccaatgatatggcatggttatccacttcggccatgctgataactctttctgcttgctttgtttcgggttgttgcattgcttgagttttagtttgtcttttccaatgcagacaacaactttggatgtgaatgacaaaacaaataaaaaaataattcaaaccaatatgcatttatttctcacgagtacggtgcatatacaattatattaatatctacttgtatgacaaattatttattagaaaaaatattagtgaatgaacaaacttcctacctgcatccacccttcattgttacaataaccacagatttttttcctgataaatggtccgagcatttaataaggaagttctacagaatcaaccttgaaatgagggtaagggcatccataatggcacagtaacgaagagtatggcaatgaatgatcgcttcattactaaagtactaataagcgttacaaattatagttattattattattcaggaaatgcagaaactagatcaagagttggagactgaaaaaaaaaaaaaagatcaagagttggagtatttggatacttaaaaactattcattagtgccaatcatcattgaagtgtagccttgcatccctctaatgttaattaatcaccactaactagttattggaataaaagtgcaaatttattggttataacttataaggagatatatggtcagtgggaatcaacttatggcaaccagctatcagaatctccaccctttccttgcaaaaagtaactaaaatgatgatgccttatttaaaaagtactccactactattttaatgaatgtgagaatgtatatagcacctcagaatggacctgattttaatgtgaatacatatagttggggaaatttaattagtgtccttcacttctttctaaattctatctaatcgaaacagaaagcatgttttcttttgctaacaaaataataaacatatcagtacaattatacaaatcgactgcataatgcatatgattgatgctttcggcaatttatgttttgcgtccttttaaataaaacctttgtttggttgaatatgagtctacatataaagtagatttgggaaagccaatacatggaatcataggtgctgcaagttacttggaaagttcaaatgaaacaaaagagtaaaacaacgagatgaatgtgactatagaatttatagacagtgaaattgctgaattcaactaaattggttggtcacgatgatattgatggttgagatattgtcacatatatgatatataggtccattaattaattaaaactacttattcctcatcaaatggcagccttcatgaaaagcaaaggaaagatcataaaaaaagtgtgatttcatccccatagctcaatgatgaggttccttctaacaatcttttatggcatatgcttttggtgaagattaaatttggtatacgccactaattagtgacaataattgtggaattaaatatcatggacgtatcataataatatttaattagtaaccacaatattctctttgaagaaggggggacattgattccagataaacaaattgagccatagtttcaacttttatccgtgaatccgtgatctacaaaccaaaccaaaagcaactactgttgctgtatttgaaatttgagctaacagtctcaccataatgaaaaatggtttgaatggtagtttcccgtatgactgcaggttgcgctggcagacagggtcagttgattgtttaaaaaccagaaatgggtggaaatggaatttggaatctctggaagcaggttctatattcattgttttataccaaatgaagcatcagttaatttagaaaaatggtactaaacaagtatacgtacaaaaattgaagatataaaaacttgcatattctttatgcacgaattacttaatttagaacttttttacacacattcctgagttatccatgagtatatctaattaatgaccgagtatctgtatctagctatgtcccgtttttctccccttagttaagttggctcgtcaaattaacccgcattcatattatactaatcaagtatttgcatacaagaatgggatatatatcaaatttgtttcaaataaataaattttggagaaaactaacaaatatttctcgtattgcatgatacacaaaaatacgaaaagaaaactacagatttagaaaaattaaagaaaaattatttaaatgataattaaaaatatatattaagatataaaatatacacattaaaaaatttatagttaaaatattaaaaattaatcaattaataaaatagtacttaaatgatcatttataagaattatatatattatgcttaatgttaattgaataaatttaagtattcttgtaaaaaaattaagtattggaaaaaataactgtgaaaattaaaaggtctcttttaaatagataataatttaaggagacaaatattgatttgatttaaaaccaaagcttataagatgtgtgtaacaaaacgagaaagggcatagatatataagttgttccatgttcagcaacgaagaagatttaaatttataatataagatatagaataaacgtgattcgttttccaactttgattttagaagctataatagtatgtttttgttatttataataatatttttaacaattttatatttcatttcttttttttaatgattaataatatataaactaactagtgtcaacagaagtaaacaagtaataagggcaatttgttgtatatcaaatttagaagagttatttagaaaaacataatttgcatttagacatgatatttttaaattttaattaaaaaatattttgtttagtttgtaaagtggaacaatttttagatagtaaatgcatacttagtaattgaatttaataaataatcatttcttaacatctctctcaagaaatttataaaagtaaatgattatttttttcataataaattaaaccaaacatatactaaatgagatataacttgaaggtccaaggaaaaagctaaaaattgagatgagatgagaccattcatgaaaacaagagaacaaaaaacaagtaaaaagtattttaatttttaatctaaaattaagttatggagaataaattttaaaataataagagaaaaataaacatgcaaacatatttttttatattttagtttaaaaaaaaatattctaaaaggcatacccatattcatttaaataaaccgtgcatgtaaaaaagaaaaggagatattttgaaattcagcttctattctggttaaaagatgaaaaagaaaacaaatctagaattcagcttctgttctcgtgaatctagcaaatcttggtttgataagtttatgttttggtttcaatgcagcggattttgctatgcgaggctatgtgatacttgtttagatatatattgggttgcaggaggctcaaactttgtttcttttcttttatctctttgatttggtgattaataaaactcatttttttttaatttagaagaattaaaacaactccctaaaaaaaaaaacaacaactcatcaagagaaatgtttattggatcttttatttcaacacaaactcttcttttctcaagtagaagttagtagaatctaagacctttgcaacaccgtcttatttagcataaacaaagtttaacgtgtatgtttttttactaatattaggaaaaattataattaccgaatgcatgaatcaattggtataaacttttttctaatttaattttagagcacataactatgttaaatactctatgtcgagtaaaattttctcttgttgacccgtggtcttgtaaaaggaaacaaaaaaaaaaaaaaaacttctattacaagctttttttttctttgtaaaatgaattaatctgaatattaagattctagctcaatgtgtttagattaagtttcaattctactaaagttaagttgaagtccaaagcaacaaacaattacttcaactttttaaatttttcatcatgattttagaggttaaaatcgattctaacttgtaagagatgtacaaacacactataagtgcatgtttgaagaaataattgacattttttttaacttaagaaattgtaggggggaaaatatttaaaataaattaacataagtgtacactgaataggtgttgaaattaatttattttatagtgaatcaaaatcaagcacaaactaaaagacagaaatataaagcaaaataatttcgacagacgtaaaaacatttttaaaaaatgccggtatgtacagcgcatacagtaatattggaaagtacgaaatgagaagttgaatgctcaaataaaaaatcaaaatccatgatccatgcatgcatgttaattgttattattatttctgggtacatgcatgcatgttataattatattagtaattgatgaacaaatttttgtttggtttccaagtctgaatcgatgggcaattgaatagaaagagacctctacacaacacaggagagtgcaccgaaaaccaaatgaaaatccatcaattaaggaagcgcaacgtcacatcgtgcattgttgaggtgggtcctacatatgaaaaaatgctttctaaatataaggattcatatttttggggtttgagaattgagatattcctttgggatgggtactcaccaactcttatcatatcaaacgcgtgatttcaatgatttcgggtaaaatgaatggtttggataattttgagttggattaaaattaatagatttaaaaaattatttaaaatttaaaatgtattaatagtataatgtgtcatttaattataaatcgttgtttgatagttttgttaagctttatactagttatttaaatagtcatatttgagattatttcttgttgattaacagtgttaaaaaatattacatgaataacgtgtggaaagtaaattcaaattaatagttaattcattaaaaatacattaatcatttaaaagaaaacatctaatttatttgccaataattttcacagatggatatctaattatccatttaaaattatttttttatttgtcaacaaaacttctctccttgtgagtactatttgagaacctactatgagcatatgctcttattgtgatcatcattgatccaatagtttaaattattggtttataaaatacgatagatggtttatccatcatccaaaccatcatgttttattcttataattgggcggataaatttgtacatgaatatattagatgattaatgaataaatggaggtaactatcagcctaatactttgtttcaattagaaatgaaatagacaagaaagaaagaaatagaaaagaataaaaataaaagagaaatagaataaaaatgttttttggataaataaaaatagtaaagaaagaagtaaataaatttctcttcacttgtttggaagagtgaaagagaaaaataaataattatataaaaataatttgtaattaaaaactaaatttaatctaaaaattaatttttaactattattttttcttaacataaaattatatattgatattttttaatcttttgttataaaaaaatatttagttttttaagaaaaaacgacaggaaagtgagatccttccttcatgccaatttggggggagggggtgaatttttttttttagatcctacgacaaaaaaaatctccttattcatacgcaccttcttaaacaataagtgagaatttgatatctgttgtctatttctcttttccatttcttttcctcccaaactccagtaaagcaacgagtaaacgagaaagggaacaaatttgtgccatctctttatgaatacaacgtgtcttgaaattgatttttctgtgagccagcaatcatcattcatcaggaaaccaaaaaagaaaaaaattaatatttatcatccataaatggaggaccaaccaatctatgccttttggattggatatcagcctgtttttctttgacttgtacccctcacaacggcactataccccattttgtaaggcaattgtcaatttaaagttgtccatgctatcaaggaagattataatttgctgaaattgtagggtgtgctatctttttcctgcagccaagacaactgtactagatagaggaacttccttgatagttgatgatatgttggttaaaaaattatcgtgtgctaaaggtgctttgttcataagttactctagctaagttcgaagttaaaatgagaccactcgaaaggttaacgaaatagccaaattgaacagaaaaatgaatgagaccacatttaaactacatgttagtgatgaacaatttcgtgaggtaaacaaggtcagagataactaccatttgagatcttaccaccgctccaaatcaatcaatagcaatctcacgatcaagtgaagcacctccaagtggtacacgatatttcagacttcagttagtgtacattagtaataaagattatgaagtctgctaaaatctacttgataatgaaaaccaaattagaaaatgcaaaacccaaactttccaataacgtttcatattgaagacaaccaaaatccattcagaatcaaagtttttttccatttccactgtattacctcattgttgtcaatgtgatgtgatggtttgttatgcccatcgctcgtggaagtgagatgatcaatgtaaggatagaagagtttgcagtcagaagtttgtcctatgcacaaaacctaaataattgtttgacatgtgctatggattaaaagctaatactataagcataaaaggtgtcatgaatttgatcatcatcctgccctactgctcattggagtcgtctgaaacatcaaatccaggaggtataaaaataacatcatcccagttcgatgtagaattttcctgcaaaattattttatttagtctcaatttacaaattagattaaggaatatagataattgcaaaaaatcccttccctcaaaaaagggaagtaacaaacacaaagggttaagtgaattccatcttctactgtaactttgacactcaccttcatttcttttattacatcctctagagtggcaacctggaaaataaatcatggtgattcctctgaaacaacaggtcatacattgaagggaatcattgtggtctgtacctggatatcgccttttctcatagtaggatttaatttgttctgctcaagggctgccgatttaagtgtattttccaagtcctcctgtgaaaaattcgtaaggtgagaattaaaaaaaattcagcttcatttctgactatctaatctcaggtaactcaatgcgagcaaatcaacaatacctttctgaagaaaagtggacgaaatctcttattttggctcttcaatatcagacttctggactgaaacttaccaatataacaactcaaaatactagttaagggattcacatatgaaaaaaattaaggtatcatagcatcaatagaaatgagtgcaatcacaaatgataacaagattataagaattagtgctccaaatatacttgtagaacagtagaacaggtccagttcatagtgtctctaatacagtatcaactcaatcaagtttcttcataacacaaacataacaaatccgttaaaaaaaccggcaaacaaggaagcacaggtacttcaaaatataagttttacctgtgtgttagacacatattcgtgtcaaatagcttctttttttttactttatatttaaattgtttaccaatacatatggaaatgccacaaaaactagaaacatgatagccttttattatgcctacaatgactcgtgctaactgtaaaacaccaattctctcttttgattcaagatttgtgtatttcgttttaattttatacttgatacttaatttgtgttatatgcccataatttttaaagtttgatactcatttcattttgtattgtataggtgcctcgtgtccaatgctgtaaaaaacatgagtttactcgttgactcgtatgagttacaagttttgcaccctccatcgagcaaacttggaggaaagatcggagacactgcggaatggtcatcaagagtgggtttactcacgagaacggtggaatgttaactgttccgttcccgaaggtggctttttgtggcccagtttgaacacgtttaaaaaaacccaaatatgatgggctattcgggtcaggtttgctgacccagttcaaaaatgaaatagaagaccctattttcagaagcaaaatgatcctccaagacccctctcggaaaaattccgtttgctccccctcgctgtcatctccatcgtcgacccactctgccttcgccaatgcttccgtcaaaggtttgaactttgaagaaaggaatgaatttgttaatggggagtggctaatccgaggtttgaaagatacaggaccccaggcatgtgctagctagcagcaatttatgagtagcagtaaagtacaagaattttagatggtctatagttaggaattcatggatagaatagtggtttaggctgtaaacctgtagaggttttcggaccttgaggggcttggggtttgggttcctatcatatgagtattatagatactggttctgaatgtagaaattaacagaatgaaagaaaggcaaatttattgagcagcatcctgcagcctcctactctggatcaatggaacccagaatgaggataatggctttttaaatttaaagtaatctccaaagaatcgaaagcttggtctctcccacccactactaactaaccaactaactccttccacttacattctctcccactatttatatcgtacctcttacagcatcagagtcccaactaacaacaactctctaaatactttaactagcaatatattttcctaattgtgggcctcttgctaccaaagtactccctcctttccattttctttgacgctttagcaaaattaagaaaaaaaaaatagtcccattttgattggcattttaatatatctatgaatccttaaatatttgtttcctattatatccttaaccatttattatggagtgagaaaataaaagagatgtatgaaggagagagaatgcaattcatataaaagacaatctattaggaaataacactattttttatgaaattaaaatattaatggtattttttagttcttgtgccaaaaccttaaacatcacacaaaatgggacagagggagtaaccatgttgttaaatggtcatggccgccatggtggggaggatttgttgccaaccaccataggcaatttgtgaagggaggcccattatggcagtgccataggccacaatgaccatctgccattgacaacattggggagtattatcaatatcatattcacaaaccagaattcccatttatgaactaatattaaattgataactgcatcagaataaaagactatggagtgtatctctcactctcattctttttattgagctggttctttccccttttctcttaaataaaattataaaatcaaacatacaatctatatacacaaaaagcatgcacattgctaatagaacttcacactcaaccactcagtgccacttgtttaatgatgtttcacaagtgaagactatgttacctacacagctatgaaattcaaggactttcattattataatgatgtacttctaagacataagatcactttattttttcttttttttttttttttgttctaaaattgtatatatttatttatgcatatatgtttgtatgcatgtccttgattgttcatccaattttgcaaggtttctgcttctctctataaacagataatcagcataaaaacagactcccctgggtggggataaggttgcatgcatctacctccctgagaccccactgggtgggagcctcaaacattggctcacccttcttttccttaaaatttatgtagtattaaaatgttgcgaaacattccttgaatcccctattttcaaatagctcgcaacataggaattaagacacaaatggaatgtccagacttaaaaagctgggagaagaacctggaaaacgggaacaccagaaaagccactggaagcaaagccagatttttccctctcctgtatagcatgagcatacattatcattactgtacagctcaacgatcaatagcaaggtaaatagataatacagggattacaagcaaattttcaaacttcacatcaactatgcatgacgaattttaaaaatggtatcaaattagctaattagaccaacataatagcaaaatgactagtacaacaccagagcagtcaagctctaattctggtaattggtgagaaccaatccaaaatcatagtaaatttgtgaagaagctatctatccacacagtaatttttcccccaagaaagctttgtcaccataaattgcacacaaagtactaaaaaataatctagctcaaagagaaacttctaccttcctccattagacaacatcacatatcagaaccaatcataattccgagagtaccaaggggcctgggctaaacgaattaatacaaacactgaagagtgaagaataaggcctatttatctgttaaaggtggaaagcaaaaaagaacagtgaaatgattcaagttgtcatgtttgaaaagccagtagcataaattattcattcaattgcttctttgccatatatccgagacactacagaagtggtccatatttaaatcctcattactccaattctaacaatcatatcgtacatcaaccattaacagtggcacatgttctgttcaatcttctccccaaggtaatttcaaatgacacattaaaatcataaaagaatctcaataatcaggtttgatttagatattaggaactaatggtagcatttagggagtgtttggtaggagagaagtttttggttttccatgtttggtatgtattttaaaaaaataacattcctgaaaggatgtttcctgaaaatgtttctcaatcgaaaatttcccatggggaggtagtaatcttactttcccaagtttaatttttcttttacaacagtaaaaacatcgtattattctttattaaattatataatataataaataattaaaatatagataactcttcgattcatccaaaacttatctaaagatttccaatgtcaaccaaactaattttattcattcccagtaaacatgatccccaggattcataattcccggacatgaaaaaactttttccctaccaaacgtccccttagggtttttgaagggtttaggtgtgtgcaaggttttaaatttcggtataacagtacgcagagtcgcagagcatcgtttgagcgtatccaactatacatttggcatacgataatagtaataataaagaaacgactcacttgcagggcattctttacttgagagaactcaggtatcaatctaaacgcaacgccgttcacgttgagctgaaacaccttgttcaaagcaacggggacaactttagagccctggcgcgcgtgggggtcgataagcgtaacctggttgaggagagcctcagcgtcgtccttgttgaagcagaagaggccaaggtttttcccggaggaagagcccgagaccaagagaaactcctcggaagcgttgctgagggcgtaaacgggaattccctctaagcgctcctcgattgcctccaccgtcatggccatgggcctgcctccccagggctgggctatccgagcccatggcggcctcgcgcggttgggctggagacgggtcaggttgcccagcagcgtggagcagcgaccctgaagctccgccagagccttctggaagccgtcaaagttcatcatgtttcttttctttgtagattgcagagaaagaagatgatgagtgagtcactagtgaatcttcaaacgctttgttcgttcgcaaggaaagtatcgtgtttttttttttttttctgaaccttgaaatatctcaaagtatgattttaatttctataacaaaaaatattaattaaaaaatctttgataaacttattttccaaacgtagaaaaaaattaagttctgaaattaactacgaaaataaatatttctagaaattaaattctggattttttaaattttttatacaatttcgaaatttaaaatacgggaaccaatttttttaacactgctttgagatttagatttcgaaataatgaaatcaaatctatgtatgaacacattattgaaatgaaaaataacaaaaagaatattgggtgcgctttaaaaagaagaaaaaaaaaaggattttataatcccctattgttgtatgttgtgaatgtttttgggctagaacagcagcaggctaaggctatattgatgacccaacaacagccataatatgtgtgtgtatagggattctattactatattcctatagaccaaaacgaaaaataggaatggcaattgctattatatctccacaattgctaaatatatttccttctttttttatatttttattgcacaaatactcttttatataaaatcataaactctgtttttgcacctctattttttattgttctttgaacttaaaacttattttctcccctcacccctttttttcaatcagtaagcatttctttccataaaaaaacgtattctataatttactttccagaagcaaaattaggggcaagaggaagaaagatatgaacaccattttgcccaaaaaaagaaagtgtgaattggggatccatcaaattccagtgctacacatattgaaattaaattttcactctccccaaaggaaaaaaaatacagaaaaataaattagcatccttaaacaatataggagggagtagattctggaggtgtatttgcaagcagcgcacgaatgcacacgcaatccaacaccaataaatcaagtatgcttcctcaaatccttgttatgaataaatgtgccatgaaagtgatgaaacccatgaggaactcgagatgaaagcttgatgggaaccccgatttgcaactccaattggcaatttccacttttcttgttatgcacaaatgccatgtgtgtgaccatatgatctctaccgataccacgaaccataaagcatccagacagcccaaactaggcatggccataattaacatgaccatatgtgctcggtaagagtgatacctaatatatggttcaagttttgcgttgttgtaatgtgtgtgaatcgtgacatcaaagtgagtgtgtgtgtgtgtgtgtgtgtgtgttagcgtgggtcttagactgtagatggcttatgtgggaataatcaaatactctccaaaaagttaattttcagaaaaggaatacttttgaaaagaaaaaaaaaacgataagatgttaaaaaaagtgcaattactaaatagggaaggtaaatatatcaattgccaataagaattctatattctagaccaagcttgagcgtcactcgattagagtcggattaaacttaaaaatctaaaaccatagtgaattaaatatttactatttaacataaaatccatccatttatattgtcgattatgtcggataacaagtcaaatgagttttagatgaattagttgggtatgtgtcgacaccaaatgtggttgaaagataaagtagttattatgcgtgcattgaatagagaggaagtgaaggtaaaggaaagtgagatcgtgataacatatttaagttttattattttttgattatacaatttaattatacacaataataaggttgatatattacaataacaggtaaggtcaatgatcttgtttcagatttatatggtcttaatcgggttggggcatgttcaagaaactaaccctaacaatttttggattggataagcaaattaattaagtttaacacttctagttacatatgttctctagtagtagtatgaacaatattttaaaaaatattattataaattttaattatataaataaatatttattttgtattcaatggacgaactaaaatatcacttcaaaaaaagttgatacagtatcttacttaatttcgtgtactaccatctcttatgaattaaaagttttcttttgaatttattttttgttttttattttgaaatattcatctataatctataattacatataaaaaatgcaaagttttggtatacacattttttatccttttttattatcataactgccttcataaatctattttattacatttttcaaataacccataccgatagttatatattgtaatccacccacgattatttaacttttattatttatattttttattttttaaaatttacagagagacaccaagtattaataataaaaacatcccattatagagtattttattttttaaaacacataatttcatcatacttaataataataacaacactagtgtgttctttaaattttcaatgctcatttaactcgttagtaataggacaatggtgaaaggtttctctctcgttatcatttgatcatttaacgcaattaaaataccaatatttgttgttatgtgattataatacttctttattgtcttctaaggcacgctcctccgacactaaccaccttaactaaaatttcttagatctgccagttgggcaaagatgattttatccacaagatctccaacaacacagcacttgctaagggccccaccattgtgccacttaactcaccaaattattgtgaccatctccttctccatttctaataacttggaatctcttcaagtttacactacttttggtgcaccaatattttgcctccttaaagagaataaactatttattactaacattttctatttaggatcagtacacctaagtttgtttgtttttaatgtgttttaagatatattgaactgacctttaaaattaatttaattcatcttaaacttgcaatgacagtttattacgtgatttattatttaatattgttttttttatatattttaaaaaagttctgcagataaaatggcatgataatgatttgtgaactgtgtaatgtgtatgaatccaaactgaactactccatacatatactgttggttcgaaagcgagacgaaaccaaacccagcgtacatcaacaatcatatatatgttggagatggcccaacgtcccagaagtttttatttttaatctgttataattatttttgtacgtttaaaaagcattgaaacttaaagaaaattggttaagaagtactagtcctatcttcgatgattttaacaaactgctacaaagtaaactgaaaaatattataataatctgatatgttcgttgacttttgaataactgttttttactgttttttccatttaagatcaatgtgctctcttgccgaatagtgttattccaatttaaaacagaaattacattgattgtggtgacaactttggttataattggtacttttttttttttaagtggttatatttgatacttcttttttgaggaggttatgtttgatacttaataactggtaaaatgaaataaaattaagaaagattaaataaataaattgtcagacagtcacttagattaatcctatatacttagaagagaaatcatcctaaaaaaaagagaaatgaaataaatgaaacacattagtttatactttataccatgttttattaaattacatctcaatttggacaacctaaataacaacataaattttactattttcgtgaatataatcgtaccatatatagtcttccatgttagtataattttgcacgagctcacaataaaagcctcccatcgcctaattaagaatataaatttttaataaatacaaataagtgagaaatagtaaatgaaatgcaccaaagaccgaaacctaattgcagcgtaaccatcgtttctcagatacaaacaaaaaaatagtaatagaactgttagaagtagttgcaacgtacgcaggggacatactttctcatttggctttggacgcttacatggatagaccgtacacactacactacacatcacaaagattttactccaaccaccaacctcattggccgtcattctccccaccgtcacagccatgtaacccttccactatccgcagcggtggaaaggtcgtcacggggagaggcacgtgcagcgcatgtgcacactaagaagtgttgtacgttaacgacatgtatacccctgagaagaacgtgagaagaccgaaatacccttttggacgtacaaatgtacaagtgtttgaagcggagaatggagatggaaacggaagtttcgtgtttccatgaacagtgagtgacttacgttgtccacatgggtgcgggtccttttgtttttttatgctgttgctccaaaccagtagtgtactactcctccacttccactgtaattaccctcttctttctctgcagcttctctgtttatcttaatctaacacacacacacacacacgccccaagccttcttctgttctgcttccattccagtaaagttttgatttttctagcctccccattcttcttcttcctctgggttttcacttgttggattttcttactctctttcattttcgatggataaccaggatcaaagaagaactcacactgcaggtgctttttcttttgcattttctctttaaagggtcactgccctcatcctcatccccttttttctcccttttcttcttcttctctctcttttcctttccatgtttcattattatattatttctctttctgggttttgttggttcggtgtttttcttatgaaaagtctttgtctttctggggtgtctggttttggaaattgtgtctgtgttctttttgaagtgttttaagtttctccaggtgaagatttttatggtcttattatttttttttttgttgaaaaatttgatgttgaaggacacgagagtcatggagttcatttgtgtcacaaatgtggatggccatttccaaatccacatccgagtgccaagcacaggcgtgctcacaagaagatctgtggaaccattgaaggttacaaactgtctgcctccgagggacaaccccatttgaatggctcagatgatgaacatgtttctgatgatgatcacaaaacaccaggtggatttccttcttatatgtagtgtgttaactttaatactgagaaatactaggagatgaagtaaatcttactaactttgatgctgagaaatactagaaaatgaagtaaatctaactgatcttgacttagtgagattaattttaattacttttcttcatgtatagactttgaaattagtactacattccaaaacaaaaggtttttctgattcgttgctattttattaggtttggttgtgtcaggtccaaaatccttggagacaggcaacaatgagaagggcaatgaaggaaatggagaaaaattaattagatcagaagatgaggtgttttcggatgcagttgcagactttttggaaagtggatcgaatccagaaattaaggaacggttgcaagataatttggactcaggtgctaatgtggaaagggttgacataaaagaaacaaaattttcagggtctactgaggacaaagatttcaatggtgcgaagataggttttagtgttttacatcatatttccttttattaaattgccttgttagttttttcaacgagtatggacttgtgtgcggtaaaacattttggcctggttaattaaaaataatgataattatgtttttgcatgatttacaggtattaagcttgatgattgcaaaaaaatctctaaagcagtttattgacttaatttatatacgttgattggattgctcaactgatgaaagcaaaatttgcatcttttcacatgactgctacatgatgaacatcaataaactaaacgtgcactattcgtcttgctttgttttgttcaatgaaatttaacttgagtattatttgcttgttagaaacttttgaaaaatcagatatgttataaactatacctttttaagttaacttctgttgtaaaattatattaaaaggggggaaaatcagatatgttgttttgatttttattgatgcaaatatccaggatagcacaagtatattgatgcgcacacatgacataacctacataattattttctaagaaattattgaataggcattttttatgacaatatctcccttttactgtgttctttgtttcttctctgtggttctttcatgtctgattatctgtttcacagctgcagatgcacgtcagttaactgacaagtcaactgatgacagccaaattcaaaattctaatatttttcaaaatgaaagtgttgaagtgggaaccgcggtggagtttcaaggtcaattgtcaggccctactgtggacccattgtcaagttccattgcagacttgaggactgaggaatcaactattgtggatagtgatgttttttttggtttgtcaagtgactcacttcttggtgaaactgaagccatgcctgatatattgccagaaaagaaaatccatgctgctgagaatgtgacagattgcagtttgatatctgttgcaaaggaaactaattttaaagaaaaggatgagattaattctgctgtagatgtggttgaaattgtggaatcatctgataatgttgtcggcgaagcatgtgaaggagtgtctaaaatagcagttagtgatgcagtttccttggatcatcaagtgggtgatggagctgttcatctgaaggaaaataatggtgctgagcttaattcctacagagatgtggttgaaattgtggaatcatctgataaagttgtaggtgaaacgagtgaagaagtgtctaaaatagcagttagtggtgtagtttccttggatcatcaagtgggtgatggagctgttcatctgaaggaaaagaatggtgctgagttcctttctttgttgcccccagataaccttcctcttgagttaaactcagttgtaatgacaaatgatgctcagggagactctgcatgtatgatacagtttgctacttccagtgataacaaaaatttgcaggaaaagggagaaggaaatgttaatgttaatcctcttcctacatgtgatgatagatctgatgaagtgcatcctcagagtgagtatggagactttaaagatcttgaaggagtggtataccaaaatcctttcctacaatcatctgagtcattgaaatatgagggagatgacttgaaggacaaaattactgaggaaaataaatttcatttcaacgcaaaccaattgagtgaaaaaagtgacatcctctctccagatatggatgttatagataatagcatgaagatggagctggtcaacagggagcctacgcctaaagaaatgcatgccgaagagtgtaccaaagtttctccagccaagctcacagttgaatgtcatcaaagatcagatgacattgatgcctcaatgaatgctaccaaaactgagacaaatgaaattcgtatggttcacctttctgaagagcatggatctgatgatgtgtgtaaaaattcccagcagataagtttaccagaaggtagtttaatggcctcttctaacgagagtcagagggatgaatcctttagtgaaacaactagggcaattaacatagacagcacaagtcatcatgaggtaaaaataactgaaataaatgatgtagcttcagatggcaaggttgtaggatctaatgtagaaaatgatattgaaattatattgaaagatcttcaacccagtgacatcttgcaatctgaagtcaaacaatcaaatgccttatttaagagtgacagcactggtaagagtgatgctgctggtgaaatgggtaaaaatgaacatgatattcctgatgctcaatgcatggaaaggtccattgtgagcgatacttcattgcccaaatctgctaccagtcattttgaaagccctgctatttcagagtctttagacattgtggatgatgggcctgtgaacaagtcaaatggtacagagtgcagaaatataaatccactaccaggtgcccagaaagacataaaagaagatgaagtctatattaatatcaaactaaatgaagaatataacaagtctgttgatacttctaccaagtcacatcaagcacaagatgctggactattagtgaaggctgcagaagaccttgctagggagtatacatctcctttaactactgaaccttctgctcagcctgacagggaagtgtctggacttactgcagtgcctgttcaagatcaagctggtaataacttgggtaaacttggttcatccagagttgatgcttcagttgactcaggtagccggtgtgacagtttggaaggcaactggggctctttttcaggtatatatacatttgttgtttttaatagaaaacatttgtactgtcttgatacattctatagtagggctattgtaatatgctagggttagtcaatgaaaccaggtaatgtgatgcagtgcttgttaaagagaagttatctgtagatccaggtgctatactgcaatattacccacttttcatagttgattagaatgggtgagatctttttgcataaacttattctcaccaaagacacatacatactggctattatacctgtgtgcaattgtgcatccctgaatcttgcctggggctgaaatttccaaatgaatttcgttggtaatgatttttgcatgcttgcgaagatgcatgcctagatcttgtctcttaatgtttttcaccaattatattcacctgttgctttggcgtgatccatatagttttctctctcatcctttctaggattgtttttccttgtataaaggtggagaggaaagtcgaaagaggatccatctcttttgttgtgtccttgccttgcattatttgtataaagaaattaaactaaaatattttaatggttttttggaagaaaaatttgttttactttttgtttcatgatccgtgaaacagttctgtcaatgcaatccgatgcaacagctgttattgatgctgaaaccttgccatcaactggcttgctggcatcaacagaagcagggaaatcaaacttcaacaactcaaaagctacacctgacacacagcaatctggaaaatcagaaatgtttgaagcaccatctttaatgacattggttgatcctagtcaggttagcccaaaagccactgcttctgaagtccagaagggacagaaaacacgacagccagattccacttcacaggctgcttggtttcccactcttacacaagttgtcaatgagtctcaagggagaaagaagaatgaagaaataatagccaaggtgacaaactggagcactagtaaggagcacactcctcttaagagccacttaggtgaggctgcccatagcagcaagccaagatctccaaaaatggaagaaaactcagtgagtcagaagagtggtaaagttctggaaaagaatggttctgggttgacaactgttaattccattctgggtcctgaatcccctgtggctcaagtggtaaaaggagaggctgcaaaagaatggaactctccagcaagatatcctgctgacatcaagagagaaaaaaggaaagttaagagcagaccatactggatacaattggtatgctgcacatctgtcggtcctcagcgaaggtagaaaattactaggttctgataatgcttccactctgatggattctggtcattgacatgctatttacagtatttttctgtttttagtttgtctttaggtgcatattttgatcatgtgtcttctgttcattttggtagcctcctaggagttttgttgtatatgttgaccatcttcagttattattttatccctgcaatcatacatttttactatatatagtaacgtatcattattttggcctggacccatattttagtccggacttagttcttgaattttttttgtcccaagggtggggaaatatggtctttgtctgagattatgtctcataataactaacttgcggtttctgccttttacattggattcattcttgttaaatcctttgataatagaagccctaaggagagaaatgggtttgagagattctgctttaaggatatctcattaatgcctgtataagtagactcaatcatgcatgtgtgtatgaagaaggaatttactttcagaaatagttgttaaaggcgggagtataaattgactctcaaaaaagttcaatggccataaacatgtggatcaattagtggacgatttgatttatttttagttaatcggtggtctcaaatttttagaacgtagatatgttaaaattcagtagggaggaatctcgtcgcattgtggtattacccgagctttaataagttagacttaaggaagacattcaattgatatatcatattttaagtctttgattttaagtcaagtagattgtgtattttatttctgtcacgggaagtagtataccttttgaaaagagaagaagagatacggattaaggagtagaaaaggagcaaagtgcattgcaagaaatcgaacatgcgctctcagtatattgtaattattctagttttttaaagtatctattatgctaatgaataaggatacgttgtttgcacattaaaatttaatttatgttagtcactaaatatgcaatatatttataattaaatttattcatttttttattttacatatgtgagtgtaggctgaaaaaatatttgtaaataaaaatcttattaatgatgattaattagattttgtcataatatcattacttcgatgatgtgattttaaaataagtaacattgacttggattttgtataatctaatcatgtaacactatgtggattatataatcatatcaattaatcattttctttttgcaatttaaatttgaagacctaatagaaaattttatattttatattttgtttttaatttagtattttattaaaaaaaaatcactttatctttaatctttctaattcaataactaatttgtggtgtccatggtgaaaacattagtgggtgcacgcctagaagcaatatattttcttcgaatttcgaatcgcgttgttgctgctactgtttactttctcctccacttcctgggagagtggtaggaaaaaccaatgttattaaaatggtctagatgagaattgttgtctaggtcagtccgggctggtatttggatcgcttatgtatgctgtccagtatcgctcgcgttgacctgggttgagctcacctttttttttttcctttcttgaaacagttttgtttctcatattctccaaccatgctttccgacaagggtcatgtggctcaatgtaaacactcattttccaataagaaatcaaaagaattcactgtcaattcaaatgaagaaaataaatttgttttgaaaggatattaatcgctacgattcgaagagagaactattactttttatgaatacagcaacgaagattttgggttaggaatataataatccaatttcgaaatcaaataatgccttatttataaaagttgaaatattttgaaaaaaaattcaaaatatttcaaaaggtacacaaataaataaaacaattctgaaacttgttgtataatttaatttctaattaagtccaattctcataaataaaaagtgatacacaaaaaaaatacagataatagactaacattttaaaacatgcatttctttagtattaaaatttgaataaaaaaagacaacttttggcaaagacatggttcaaagacatttttctcaattgcataaacattactataaccactgagctaaagtctttagtcaataattatataacaaatttaacttttatagagtatcaacacataaaatttatgtttttaatatacattgatttattgggttcaactaatgtttatcatgataatgcttttaaatttggaatatagacttgtgttgttaagaactctattgttatttgatatattagataatttatcctaataataattttaaatttagaatatggattaatcaaagaatgttaactataaatttttaatatatataagatcaaaccaaatcaattggtgattactggtttgaccattgatctattaatctagattttcgatcagaccgatgactaatttgattttcacaacattgagaaaaacatcaaaatgttgttaactccttctccgcatggttgactttgacttgctcctcccaagtgagttatcagaaaagtagcttctttgtggttttgtgtggggaagctcaaggtatgaagacattcatatttaggaagttagagattaattaacatttaataaattattaaattaaaaaccaaaatataaaatttgttattatgtccttagatttgaattgcaaaaaaataaaataaactttattggatgatgtgactatatattccacatgacattacatgattagactatacaaaatacacattatgtgacttattttaaagtcacatggaagtaatgaccttgtcaaaaataacaaactaatgaatattcttagtcaatacattgacaacacaaatgttagaagagtactgtcatattttttaacactctttgtaacacattttcttctattaattgaaatccatgtctcattaatttaaaaacgagacttaacgagaaaaatgaaacctatgtattaattgagctctataaatttcatttaataagaaacaatgcatcataaagaaaatgtatattacaaacatttttatgaatgttagtaggttggaggcatactaacaatcaacaatgttttccccctctaaaataacgataatatagtatcaattttatagtagagctgacaaaatgaacgagttagttctatccaatccattggaccaaacgtgaaaaataggttggatgaagcttacccatattttatatggtattcctttttttatagtccaataaggcccaatgacctattagactagcccatattggtgcatttatttatttatttacctaaatttataaaaatctaaaataaaaattttaaaagtataaagttaaaataagtccaattaaaatatgtaacttatatttcttaagttcagcctaatctaatagacccaattatattagtaccaatgggctgatctgtaagtaagtttttgtcttaagttaaaaaatatttttctaaataatttaaaataatgacacatgtactgcgactttcacgttatcaacgtgacactccaaccaactaaactaataggtcaattatgctaaaattcaattaatattgataaatataacattaattttttaatgtatatttaatacacatataagtttatataataaattttgtaacaattaattttgatctaataattaaagtattttttacatataaaaatcatagatttaaataaaaatcataagtttaataaaaatttacaggttcaataaactgtaaatacaaatataatttttaatttaacatgtaaatacaaatataatttttattagacctgcaaattttattaaaattatgatttttatttaaaactgtgatttttatatgtaaaaaaaatactttaatcattagatcaaaattaattattacaaaatttattatgtaaacttatacgtgtattaaatatacattaaaaaatttaatattatatgtatcaacattaattgacttttagcataattgacctattaccttaattggttggagcatgttaataacgtgaagatagcaggtttgaaacttacatgtgctcttattttaaattatttgaaaaaatattttttaacttaaaaaaaaaccttaaaaccttaaggattagcaaatccttatatttgaagcctgtaataaagcggtgtataaagtttttcccttcattaagttggccctttttgaataggtagtaggtacccagcgggccaggcccagccgtggcgcgtagggctgagtcaaagtctagaaacccaaaccctatcacccaactccgcaaccattgaccgaaccacttccaccagcagcgaagtgagtgagtctcctcaactcaacaatggtagctgcaaaaccaaagtagacaactttagaagctgcaaaaccataatagacaacccaagaaccccttctttagtgtttgatgtcttgtttgttaacttaatgcaatccctcaagtcacaccctgctcttttattttccctttccaatcacttctcttcttactctgtcagatcctttctctcttctttgtcaacccaatgtcaacactcaaggaaagcacttccattgttgattatctaaatgccaagttcgaattctcgagaactcaatccttctacatctctagacatgtttcaatcagcagattcccacaaaatccattgtttgtgctcagttttttttttttcaaacaaattggattttctgaagcccagattctgtttttgatccgtcacaaaccccagatattgttcattgatgttgacaaatcttgaggcccaaaattgagctctttcagctgttgggtgtgagccttcggagttgtgcaagttcatttccaagaattcctccattttgacttttagtttgaagaaaacattggtcccttctgtggaagctattaggaaaattctctgcagtgagaaagattttattcatgttttgctcagatgtggcatgaaaggtatcaggctcagatagaaaagcagcaaggaagacgcaagtatacaaggatgaaagaaaagaatgaagagaaaatattataagtggagaattatacatggtagatgagtgaaaatgaggtaattggtgtattttgcctaaaacaacaagcttcacaaacagaggaagctgaagattgtttttgaactatagaaggaagattacatttgtttaatacatttctaacaacattagggtcagcatggcctaatcttttgtgccatagatcaaaggaattacatgcagaaaacagggcaatgggtgagttttgaactgaagattgtgaatttagatggacattggtgaactgatagaggtcatctttaagagtgcccttgagaacaattttcttgctgacctgagattttacaaaacaatgattaggatgaaattcaaagaaaacattgttatccttggcaaattgggagacacttattaaattcttggtaatggaaggcacatgtaaaagattagcaagtttaaaaatagtaggtgagtgagaagttgtgaaagaagaatgaccaacatgttgtataggcatacatgcaccattgccaacatgaacctgatcaaaaccattgtattcagaaccagatgagagattaccaaagtcatgcgtgagatgatgagtatttccagagtcaggataccaagctatgtcaatgagagatgtgggacctgctagatagaatgtgggatggtgaaaagaaggaggtggaggtggaggtggagttctctgattctgattttgaggatactgttgctgaggtccttgaggggtgtttagatatgtggtgtcatagtggtagaagcatcttaatgcaggatgaccatgtttaccacaaatttgacattgtaatcgagtttgattccaaaaagaacctttgtttctattacctctgaaggtacgatcccctctacctctgcgtccacctgagaaacgacctccaggataatcttgtgcagtgtttcgttggctgaagttggcttgaacaggggtaatctctgttttcttgaaacggtcaagcatattttcttgagccaataggaatgcttccaattcaattatagagaaaggaggagatctggacatggcagatgtgattagaggagcatactcttcacttaatccatcaaggatagcctcagagtgttctgcatcagtgagaggagctccaacagctcctaaggagtcaactattttcttgatttggagaagatattctgaagctgagcctttctttttgatagactttagttgatttttgagttgcttgacctttgcctgtgtgtgtgaagaaaaataagtctagagctttgtccaggtttcatgagcaaaattgcatcctcccattctgtttttgaatgccatgttcattgatgagaggagccaagaacaagaaggttatcttgttgatgccagtgggtgtatgctgtattttccattatgctttcttggttttctaatgtctgtgcagggactttgtctttatcaagatggtcttgaagattgtgaccatgaatggaggctaaggcaagttgctgccatggcagaaagctctcttcatccagtttgtctgcaattgggattgaaaaagatttcatgatgatttttgttgctggtgtgctcatgttgcttgtctcagaccgaggagaatcaaggatggagtccatggatcgtagatgtgctctgataacatgaaaggtatcaggctcacatagaaaagcagcaaggaagacgcaagtatacaaggatgaaagaaaagaatgaagagaaaatattattgatcaataataatctttgtacatgagaaagatatatatatatatatatatatatatatatatatactcccaaagtacaaaaaaattatggccaatgttgtcttcttggagagctgtggcattgttgggtctcatcttgcaatgctactcaaacaacagccaagtattctcatcacacagcagtctactataggaaactatgtttcgcgcactgtaggcatgggtttccatgaaaattcaagaatgcttgtccatgtaatccattcaataagtagtttgagctataaaacatttaggagaaagctggagctaattatttgtttcgatttttccaatgaggaaggcctgcaatgtttagaagatcccccaactttgcttagaacatcagggaagaagttgaaggttggaatggaattcttcttgcatacacttatgatgcccaagtcagtcctggttcatcagccaagggttttaatgtatagcatgaaggatcgcgtgcttcctcgatatagagtcttccagctctcgataaaaaaaaaaaaaaaaaaaactttgcaggaaggttcccaggtatatttatttgttgtgcttgtctgaggaggtgttcttggacaagtatatatcacagtccagagaaaaggcagaggaattattagtagcatacaaggttcattatctggaagcatagtcatatcttcaaattctgtttctgaatattctttacaggaagccttgggcaatttcgggaccacaaaccatgttggtgcttatggttttcacctccttcagttatcccctcacccttccaattgcaatgagatatatgttctgatggcaacagattcttctccctagttttcttctgtttctccaatttgctctacacttctgagtctgcaatccattgtcaattatcacagtgacaaaacggtggcaaatatgcatttaatatttaaatagaagtgtacctgttttagcaacaaaaagtgtttacttacattaccattttgtaattgctcattttcacaaaacgctacaataaatatttatgagaattactcataatgtgtctttctgttaatttgtacctttttcatatatgctcgtagtcaaggttttaaaaaacagtccatgaccacaatttcagtcacaacttcaaagttttcgggggtgtctgtgactgtaattgctattgcaatgactgtatttctccacaatttccagcaatatcaagaaacgtgatgaaatcacaacctgtatttaaaacttcaatctagtcagaggctacagcagggtagtagtgatggctttcaccaacagacattttaccctgttgatgtttcctccattttgattttaatcattttttaagtcggttcgatatagtcttccctgcaccatttgttacttctctctctccctcttctttttttccttggggagaacattttactacttctattatgttggatggagacatggagttgtaagagccgaacttcttttcaggtcaaacaatgatagttatgacttatgaatatttttgcagacggctttagtcctatcattatcaacagggaagttgtctgaattttcagcatattttaaccattgcaatcaaacgttgacctttgcaaactgagcttatatttcaattcagtacgaaaatgtttcaattttaataagaaacctttactggggttcaaatcttgatgagtttatgggaatttttttgcctaatcaatacgacctatatgaggatttgtaagcctttgacatttagtcaacaaatttctaagtgatttttgtcatacgcgtaaaatcaccagatctatatagagattttataggaaagttcgattaatgtttttgatacggaattaaaatcaacatgtataagtataacatagaaaagtgttcgtaatattttaactaggcatcagcttgagctcgaaaatacatgtatgaatcgccttacaatgattgaatcgaacaaccaaaaaaataaacaaatatggatctgtcaaacagaataaagaattacgtcaacgctcctcgccgccacaacctcttggactctgcttgtggtggcaccaccatggtagtggtggtcgtgcttgtcggagaaggatggagggtggtagtacttacggcctgtttgggggcaattagagtgaaaccttgcagcaatccggaccccttggtcaagaatctcaaccagcttccccatgcagctattcttcaaaactcaaaaaaccattcaccctcttttctattcttctctcagaatttcttagaggggagaaaagagaaagggtgtgttacatgaagacaagagacatgaaaatggaaaaagagagattcttgattgttgattgttgtgttatgggaaaaaccagagtggattgacgtatatatagctggtgccttgccatttccactttctgcctttctgaggcagtgccgtttcttagtattttctttttttaatattattgtcgacttgttcggtcagaaccgcgtttcacatcatgcatatgtttgtgcatcctatatttgactaattatttgtcttttgatttttcttttcttttaaaacattgtatactttttaattttttttattgctttgttttatcgtaattaaggggggagaaattgaaaaaatagattgggtcaccgccaagctgacttaattttgaaaataaaaatggttaaatataatctgttactctataggtcatcttgaagattttttaacgtttagcacgacttttttgaaaatttggtcaatctgaattctaatttaaatgcttatttaatagttttataattccttctaaattaaaaatagtatttgaatttttttttcctaaacgcacgtgtcttctgacctattgagtttagaaattaatataactagttaatctaattcaaaagaatttttcacgtatcaaataaattgttttatcaataatatggatattgtgaaaccttacattattgtattagtcttatgtgttaaattatttgagctgaagtagatttatttagattacgtattatttatagttttagaataattattcctaattatttattaaaactataatatttgagtttataatggttaaaatcaaaagtattttcaaaattaaaaagagaagaagagagaaacagtaatagtgtgcattgatttcaaaagatatatctaatgtaatatacaaccttatatagtattgcttctaatatttaattaagaattgaatacgaaattatgaactaactaatcataaaaaaggactacaatcataaaataaaataaaaaatgaacgaagtcagttaattagcttgacttttaatgaaagagtactataaatttacgtgtttatttgttattattagtatataatgtaatatgtgtggaaaaatataaaaaagaaaaggttttctttagtggtgtattatttggagtccataaaattaacatgacaagaacttatgttaaaatatggatgttagtctttttcgtcaactctaatataaaagcacaaattttatctatgttatttatcaaattgtatatacttatttatctattagaaataaattatttataagtaatgaattatgtagaagagttattatgttattataataatatttacaatcaagtatccgaaatttttgttttttattttgcatgtccctccttatattcttttcgtaaagggtagatgtaatccaatgcaaaagattataaaatctatctttattatgtcgattttgatttcaatcaactctaaattttgataagtgcatatgattttttattcaaaaacataatactatgattatatatattttttgtgaagtaaatatattagcataagccacaaaatatgttataaaaagaagaaaaaaaaataagaactgaaaacctaaaaaagaaaatgaagaaatacaagctgattctgccataaggcgttaacaggaaagttatgaacaacatcaccacgcttggcaaaaatatcagcaatttgatttgcttttctataaacatgatttcacaacttgacatattgatgaatattatgaatagacatcaccaaattatagcaagaatagaaatcaccgcaacctttagaaagaaattaatggcattgtagtcaaagtaagcaactagcttttgaaattttacactctaagccagctttaacccatgtcaaatattccatagctgtgactctaaaatagaacaagaacctaaattaattgcgtaacaaaacaagaagacacgtctctgttaatatactcttccgttccaaaataataatttctttatagctttttgttcttattccaaaataatagtttcttaaaattaattttctaaaaatatgcctggatagtgtaattaagaagatccattaatatttgcattaaaaagagatatatatcataaaaataagtaataagtagtagaatgtattttttattggtggataatgagataatttatgataaaaaatagttgaaaaattaagcgtattttatctaaatttctatcaattcaatattttttaatcagtatgtcgtaaccttaaaagactataattttggaatggaaagagtatgtcgtaatcttaaaagactataattttggaatggaaagaggatatgtgttattttttgtataagtaggttaaagaatataataaaatgaaaactaataaaatattcttacgcggtttctagaaagttacatgcatcagtataaaataaaaataaaaattatatgcaccaacctatttaaaagtaaataaataataggaggatactttagtggcttccggtaagccacacaccaaaccactaaaaaaaggagagagaagaaagtcaggaacacgaaccttatataatacacaaagcacgtcaaaatgtgcctttcctttcccttcataacccaaaccctaacgccgttggttcttcccgccggcaaccatttcagtggcttcttccgccgtcgccgctcattgccattcctccattttctgatcaggtccttattctttcgatttcttctatttcgttatctgcggtattctctatacactgtctcgcctttgctttctagttcctactgcgactgtgagtctgtcttcccaatttcccgttcccgggttttgtactactctcgaacgggaaattcaacggagttgtgtttgggaatcgcgttttatcatctcatttctctcgccattcacacacttcttcatttttgcgtttctcttttcttacgctattttgctttcattttcatttaacctaaccgcgtttatttttcttttcgttttcctcagttaattctcgtgtttcttcagagcgagcagaaggatttcagcattggagaccgaatcggggtgagttttaatttcaatgcttctttgttaggtcaaatttgttactcaatttgttttctgttgaaataaacaagtaacgtaatatattgcttttattttgaagtattttttattttgaaagagtaaataatcaaattagtgccaaaatgatacatcagtaatatagaattgtgaaatttacattcacggtccccaaatatgtatttaaagctttttgtttaacttacattggcctcaaagcaactctgttattgctttcttgcttaattgctttggaaagtgcaccagcagggaaccaaacatgctactattcgttgttgaattgatctctcgatatgtgttctgtcagagtcaaattagtctctgagatttgtgatatgaggactgatttgacccaagaaatacacattcaagaacctttaagcataatttctatcattcaggaactgatatgacctacgctatatcattgaaggactaatttgactatttacttaattctttatatggaaaagaaaaatagattttggcacaaaaaaaaaaaaaacccaagcctctccaaatggccattatgtttgaatggataaaacaaaattgaagcaaaaattgcattccgtttcctttagtatatctgtaaatgacctcacgatggtttgattttctgtagtttaatattatggtttgcattttttggtttgaccaggaagaatgaggcctacaatgatgcttagggctctaaccaagcagtttcttggaattgtaggcgatgcagcaaacactgtcgctaagaagccacccccgtctcctcctctgctgtcacgcaaaccagcgttcattgatgcattcttgtacaagatgaagaagaacccaaatcttttgtcgaacaagaccatttggtcacggagatccactgtcttgccagaatttgttgatacaactgtcaagatttacaatgggaaaaccactattcgttgtaggatcactgaggggaaagtgggtcataagtttggagagtttgctctcaccaggaaacgcaagaccagagaacaagccaatgccaaaaatgttaaacaacttaagaaaaagaagtgattctttttccttttgtatttttggacaaaaataattttgcggatattttaatttctgcaattatttacatcaatctgttctttcttaggttctctagattgtatttgaagacctaacaattttccctgtgagaatattggcaacaaggattttgatgaaatttgaccgcgattgtagttgaattgcttctttgactatctgaactattcatttcatgttataatttaacttgtggatgatagatcattgattgatcaatttatgctcatcacttgtgaggacctgaattttatcgtagtttgcttatatgctgaatgcccctgcaattgcatagggatgtcatcattatgtgatgtgcctttgtgaccaggaacatgattctggaatgctccactacaagtaatatgaaagttatgccagtaattttttcatgtagaaacctgaggcagggattgaatgcccggaacacagcataatcattaaatggccaaatataatatgaatctgagaaaaactccacactcaaggttgcttcactaaagttttgcacttgacttataatgcattacttcttaattggtacagaaactggtgtccatacttttagtaaaagtttatcactttccttaccaaataggttctacaatgtcatcatggtaaatccaaaggccattaaatgttatctgtacaatttgacaacaaaatttaaaatagggaatgaaattatgaaaaaatgagatgtaactaataataatttaatagaaattgatagagaaaaataagttataaattattgtgaataagacaactcttaaaagttaaaaaattgaattaattataacgtgttgttatagaacatcattgaatttcaccacatgcatttgacaaccaaaagctaaaaaagaacgttttataaaagagtaatacgctaatcgaagggggttttgtcagcttaaagatcccctaaaccacttaaaaacttttggtttttcaccattgaatgatttaatccaaaaatgacttattgcacagcaatcagtaagcaatccttcatataaaggagatcacattttgagaccggctgttcactgtgggaaaaaaaagtatttacttcaccaggatgtgtcctgtaacgctaacttcatatacagaattgcaaatattgttgtaattctatcaaattccacaacatcacaaaatgactttaattactctgcaacctagtgtgatcaaactaccctcatttgctttgttgctgtcacagacgtagctctcaacttacatttcattatcctttctttctgcaacacccgaggtacgtttggttggagagaaaatagaaggaaagaaatcagaagaaaataaaacatgattaccgaaacattttcttccgtttgtttggagagaaaatgagaataaaagttattttttagttacaaaaatttaaatttttccttcatttcattttcctttcgattcaaattttaaaattttccttccattttccttccttctatttttttccttcctaaccaaacatagggccaaactctatactttcgatgcctttatttctccacgaacaaaatccgaccatagccctaaagaataacatttcacaactttctttattcctcaataggcatgggctacgaccagctctcctttaagaacaaagaaaagaaaacaactgaatggaacagcaaaacgtagaatacgtcattggtgcattgtccaaaccaaagtccaaaacccgtaactgtcagtcactactatcaggattggacagccagtctctgcagatgctcgagcctcaaagacaacttgaaggctcacgttgtcagtgaagattacatctgaaccagcagccatctcatgtgcgttattgtatgttgctgagggattcagctttgctaataaaaaatctagccttttcaacttcagtgaaacccaactaaggttctcatcaagaaaaatctaaacctaccaagcaaaatggattaatgaaacaattttctgctcatacattatgaaagtggtatttcatacatcagcaacactcacaatactagtaaatttcaggaaaaggaaacaatgtaatacatgtacttacttgagaaccatgttgatcacatactaccaatctaggaacagggaaacgctctccaaatatgatttgagatatacccctgtctccattttaagagatgcaagtctggccattactactgcagcagtctggtcatatccttggaccaattcctaaagataaaatatatattctcttttctaataactgcattcttcttaaatgatgaaaatgcattaatggactgaaatacagcagcatgctaaatgacaatatagaaaagcataaccctaaaactattattttttcacatatattcaacaatttttgtggaaggagaaggctgcatacaattaccctccaccatacatccacgatgtgaggagcctctggcatcaggatacattagtttttttttttttttttatatatatatatatatatatatatatatattcatcaattttcggcttgtccttccttgtttgttgtgggcaatgcagacattgtgtgcaatgcacgcacacttgcttggagacaccattttagttatatattatgccaggcatcctaagtttaagctgtatttgagaaaggaaagagaggcaactttaatttaatcccacacctaggtagtgtgacaggtatgacctcatgtaactacccactgaacaggtggcaaacatggaaagctatggtgggcttcagctaagagggaaaacaaaaagtggtgagaaaggagtaaggacagtatgggagaaccaggcctctcaaactgcctagatatattgtattttcttttctgttctctgaagaggaagtgaggaaaagagtttctacaagtttctctgcaaccgtagtcctctgacatcagcagtagaatttcagtgacaatgcagcactattcagctatttctgctccagttctatcacattacaatatgaccttgccaactatagttatttctatgccaattttgttatacaggaatttttatccaatacttacaaaatgcagtaactgaaacaggtctgtttctattaaatggatataaaaaattggtcattatttattaatcaatttaacaattaaattgtcacaaaaaaatggtcccaaattccatataatataaggtattagccataaaaattcagtttatattatagatgcatgtagaggtaaatcattagataactatgccaaagtttagaatcagaagtgacagcaaggaaagagtcaagagaatattatgataaatgtagaagctacaactatacttttgacaatgagaaataaactaacatttagccacaaatataaaaacaaacaactgaaactacctcagagcaaacagcaacatctacccatcttctagttactatggtgactcgaagcactgattgaccgtttgggctctggtaactgcaatacaacatgatcaatatattcaagtatcagcaaggagggggaaagaggcatgtcaaaaatagttatttaagacaactatataataaagatttaacacaaaaatatttatcaaactaaaataatatcgtgtgacttacaacttcccggtgaaaaatagaatttaaatataaatagattctgatatccaaatcaaattaataaaaataaaataaagaaaaaacttgctcaacttttagttagattcaacgtcaacagtatttttaatctgaaattaactaaaattagtaatagatgaatccaattatagataaaaataggataaagaaagagaaaaaaaagtaaataagataaaagagatgaaaaaatttgtttataaatattagaacataaattatattttttataatttataactatattaataataaaaattatttcatttaatatacatatttttagtaattctatttttcaataattattttttaatgattaatccattatttttagttaattaattttttttcttattttatttagcttttaaccctttttttttatttatttaaaatatataaagaggcaccccctggtcatcataaccacaataatagtaaaaaataaatggaacgaacatgataattctggaaccatcttgacaaccttggattatagaactctctagacacactctcctcttccactcctacctatataaacatgataaccgtaaaccatttcttgtgatcgtgtgagaaatataaaaaaattattttctgtgatcgtgtggttttctgagttctaagaactcacctctttcgtactcatttattcgcttgttgtgggaagccatggacgaagacttcgagttcccaagtgctggcaacatggaaatgcctgaggaggaagagtttgagagtccgatcctgaaggtcggggaggagaaggagattgggaaaatggggctgaagaagaaattgctccaggaaggtgaaggttgggacacccctgacagtggagaccaagttgaagtgcattatactggaaccttgcttgatggaaccaaatttgattccagccgcgataggggcacccccttcaagttcaagctgggccaaggtacgcattcttttttcttgcttttgttttgtagaggcggattattgattttatatagagaggatttcaattgatcgactatataaaattctttgctgagtgatattattctttgcttaaaagtgaaaaattgattaggatcaatttatttatgggaggtttgagtaattgatgaagtattaagttgaaattttgttactggtattgtctgtactctgtatgtagatgaataatcattcattgattaaaaaaaatagttgttaatgttatatttacatacataataaatcacaaatgtaatcaggatgaaagtcttttaatttatccttatgctggacatgaaaattaaactaaagtgattaatgatgaatgaatgagtaactatagtatttaatgttttgtgacttggttaatgcagggcaagtgataaagggatgggatgaaggcatcaaaaccatgaagaaaggtgagaatgccctttttacaatacccccagaattggcttatggagagtctgggtctcctcctactattcccccaaatgcaactctgcagtttgatgtggagttgctatcttggacaagtgtgaaggacatatgcaaggatggaggaatcttgaagaacattattactgaaggggagaaatgggacaatcctaaggacctggatgaagtatttggtacgaaactctatcctgtattgtctttgagattcatctgtttagcaacactttcagtattgtttaaagtttccttctttctctcttttctgcagttaagtttgaagctaggcttgaagatgggacagtcatttcaaaatctgatggggtggagttcactgtggaagagggtcagtctcatgcttcaaaagtttgaattttgtccttaccgtgtaacttgattctcgttgcaagtaacaataatatgacttttttcttttcttttatcatgcagggtatttttgtcctgctatggccaaggctgtaaaaacaatgaagaagggagaaaaagttctcttgaatgtgaaaccacaatgtgagtaagactgttgttatcagcaatacttatgtctacacgttttgcttgtgcaagtttattgacattcaaagtttttgcagatgcatttggtgagagtggaaggccagcctcaggagatgaaggtgccgtacctccaaatgcttctcttcaagtggatcttgagttggtctcgtggaagaccgtgtctgacattaccaaggatagaaaggttctcaagaagactttgaaggaaggggagggatatgaacgaccaaatgatggagctgtagttcaaggtacagttttattacaatattttcaatcccttctcttcctttcttcatttaaaggttttgtatatactggatgggatgctgaagagtttcattatttcttttgtttcagtgaaactgattggcaagctgcaagatggaactgttttcgttaagaagggctacgatgatgaacagccatttgagttcaaaattgatgaaggtacctctaacaatcatttaaacttcatcataagtcttgctttttctattactagttactaagttgtatgtttgatcgaccatgtagagcaagtaattgatggacttgaccaagctgtgaagaacatgaagaaaggggaaattgcattgctgatcatacagcctgattatgcttttggcccatctgggtcctctcaggaattggctaatgttcctcctagttccactgtgtactatgaagttgagctgctttcctttgtaaaggtgagaagtgagagaattatcatgttttcttcgtcttaaactttgaactaatttgaaatgtaaaaccatttactgaaaatggggatgcaggaaaaggaatcgtgggatctgaatacacaagagaagattgaggcagctgggaagaaaaaggaagaagggaatgttttgtttaaggttggcaaatatgaaagagcttcaaagagatatgaaaaggtatacctataaattccaaaagatcttatttatgtaacttggttgctgacggttatgttgtggtaaaaatgaactaacaataggtgttctttttctcttgttgacaggccatgaagtttgtcgagtatgattcctccttcagtgatgaggagaaactgcagactaagatattgaagatcacatgcaacctcaacaatgcagcctgtaagttgaagctaaaggactacaagcaggcagagaagatgtgcacaaaggttctttgtctgattcagcctaaatttgttctttttccttggctgaaggctaaatatattttcagaacctaaaagatgactgagtctagggtgcgtgagcgaaacaagtttagtgtgatgtgaggtaataatttttttgtcagttgtcaaatgcgtatcgcctacatgctacagtaacagagtcaaggactgcatttttttcgggaaagttagaaattatttgaatcacctgataaagcaaaagcaaaaaaaaaatgtgaaaaacactgaaaatttaaatagattaattataaaaacacaaatagttttattttgtcaaattttatattttttttttgaatttgaatattcacacaaattaattattactaaaaaattgaaagttcttttacttttttcaaaaagttaattagtttaattaatagaattttgattatgatgatcattttattatttttttattttattggtaagtctaagatacgtcgagattatatactaaaataaaataaaggagacaaataaaagttagatatgaaaacatgagttctgataaaggaaaagtcaagtacatattattctatttttactaattgctcagtctcttatgttgatggtatactttcttgtttgttaagcttaaaataggaatttgtgtcaattgagttgaatgtagggtcatataggttttcgattatgtcaaaagtttagaatatatatgaccttgcgttcaacttaattgatccaaattcctattttaagtctaattaacataaaaagagatgaaataattagtaaaatttgtacataatgagagagtgagccaaagtggaacattgtgtgcttggtttttccttcctcctaactcatgtcttcatatttagtttttatttgtctccttgattttattttgttatatgatatggcagtgtcaatgtaagttagacttatcaatagaataagaaaagataataatatgatgatcataacaaaattctactaattaactttttttaaagtaaaataactttcaaacttttagtaacaattaatttgtgtgaatatttaaatttgaaaaaaaaaagtatacaaatttgacaaaataaaactgtttgtgtttttataatcaacttacttaaattttagtatttttcaatttttttgttgattttgctttgtccggtgattcaaataaaatttctacctttcccgaaaaattgtagcctgtaggcgatgtccagttatgcgcatttgacaactgaataaaaattactacctttcccaacatatccgataaccacttcatcatctcatcttgatattgatgagatatttaaatccaacggtctaaattatttttgcatcatacgaaacttttcatttacgcaccctatactccgtcctaagagatttactttctttcctacgatatttatgttgtgttttttgtcctcgtattttatgaatggctttttttattttttgcttgaagttggattcgattaactccaagcctacatgtgaactaactttgcaagtaagctgacttattagacaatgaaatatagacacgtgttaaaaactcttctacccgtttctctctcctaaagcctcttcttctccctcccgccacctcacttaccctcttcctaaaccatagcctcgccggaccaccaacaccaccgacgagtgcggcaaagtcctggtgttgtcatgattggagatttctgatttgggggctaggatttcaaattgggggtggggatttctgatttgggagggatttggcttggaggtggtacgtatttggttcaggtgtggtggtaatggtggtttaggtgtggtggtgatggttcaggtggtgacttgtttttttttattattattaatttataatttatagcaattaaaaatatcacaaattatgttattgtattttattttttatataatttgtaatgattggaaacatattttagccttagcgttagcgggattcaaaaagggaatagagtgaaaatagttgacatctgacttttgctttatcaagcaggttttagagcttgatagtagaaatgtaaaagcactgtatcggagggcacaagcgtatcttcatcttgtggatttggatctagctgagatggatattaagaaagcccttgagattgagccagacaataggtatgcttttgttctcaagtgttatcaacttgaatatatacagttcatatactttagttctaagtaggtaacactgatacatggaatttctttttgtattaaccactgttcgatggatattatcagggatgtcaagatggagtacaaaattttgaagcagaaggtgagagaacataacaagaaggacgcgcagttttacggcagcatatttgcaaaaatgaataaactagaacaagcaagaacagcaacagcaaagcaggagcctgtgccaatgactattgacagcaaagcttaaatttggaagatacctctgtctgcggtcgtctctgcatacaagtaccataatagtacgtattccaattgttgtgtcgtctgaagtcttggtcacataaatagctttctcatatcttgtgtgattttcatatgaagaaatgcatatggtctaggttgtcagttgtctactgatggctaataagcatattttcatatgaagtacgtattcaagctatgtatactgatggctaataagaaatgaagtgaagcaagttttggcaattctaaatgtctccttgttcccttaatcaccgagattttcaattatagtttagtttatgttattgtttattaaacaaaggatttggtgtcaagaattttctaaaattgcaatgcaatcaactacgctggcacggcaagccctcgtagctacgtatcatatatttttctccaggacttgataataggtattcaaaaatttaggaggcagcttgagtaacatactataggctcttttcgctactctaagcctagtttttgtaaacaaattattagctcctccttcttctaccgctacaaaatgagaatgcaaccgtcttgtctaccacagaagtcatatacagggcttttgcgatcacatcacgagacgaagtggttttatgtgaaacttttcgaagaccaaggtgtgaggaaatttaggtcatcttcaatgggtgattttggagagaattttaaggggaagattttgttctttcaaacattctcaaaatcttcatatattagaggtttgattcttataaaataacttcgaaaatctctatgcttttaagaaaatcaattattatcattctctttccctaaatgattctggcaaaaagatgggaagaaatagatcaacaaaaaggaagaagggaatagatcaacaacaaccatgaacagtccagaaaaaagttgagtacataataatttaattttaaaataaaatacataacaataaaataatcacaaccgtgacaacttcgggagaaaaaaggacattgggtgggtgtggatcaacaaccacaaggaatattgaatagtccagaagaaagtacataataatataattttaaaacaaaatacataataaaataattcaacagtgcatagagacatggtggttgacgcgtgatggccgaagacgattccatggcctgatcggaagtttcagagcaccgcgagaaatgtggattgaaggggacatagcgaagtgtgtgggaaagaaaatagaaataaaaaaagaaaaagaaattatattgataaataaatattttaattaaaaataaattttgtattttagttataaatttttaaaaataaaaaattatataattaattgtttttaattatcttaaaataattataaataaatattaagagtttttttagattttcaaaaaagtttaagatcttaaaataatagttaccattaaagtaaaaaatttaaaagatgacaccataagatccaaaaaaagattattaaaatctcaaaattaaattgataaaagactaaacagtattttttttttatataatagaaaaagactgaacaatttattagcttcaagtcttccattttgagtcaagtgttaatctacgtagaatttgagtaaacaatttaataacacgtagcctcaacaaacataataaatttggccgtttagcaaagcaataaacaagttctcctggatttctagcgacaatgctgttgtgctcaaattcttgcggaacatttctatgatcttcgaccatgggatttgactttcctcacattttcaagctcctttcttgtacccgatagtctctgcaatgcatttctttcttcaacctcaacccgttccttcgaaactgctttctactgttgagcttcatccataaaatgctctgccgctgaaattttggaagtaggggccaccttattccgatgagcttcgagaactgtcttctcatcatttatagcaaaggtttgctggatggaatatataatgcatttctttcttcaacctcatctttaaaggaaggtcggacaaaagttaaaagcagccaaaaggcaaaagctgcatatgaaacgtggatcaggtcctccttataacaggcaaagtccttctgaactaagagcccaatcataatcgcaagcaaatatacatgtagtatccactgtcgccattaccaggttgattagatttatatgttctctagtcacaaattcctttgtccattattataatgccattcaaataccctagtatttctgaagcaggttagatctcatggagtttctactctctgcttatccaacttcaaatttcttgaggaacgggatccccatgttgttcattaaacttaatatttagctttgttttccttcccaacggatttgtaaaaatgcacagctgcactcatgatgaacctgtcgccttttgttgattcacaaatactttaaaaaaagttgattccttcttccacatatccacatttcaggtaaccattcggcattgttcggtaacatacaagatcaggaactaaaccaaaagtttatatatagatcctcataaaccctcttggcttaatcaatcaatccagcttttatgaaggcgtggagtaaaatattaaaatggacacaagacagtggaatgcctttgctttgcatagcatgtatggtttcctcggctttagaataattcaggctccttgtatatgcttggagaagggagagatatgtgaaagaatcaggcaaataaccttgcctctgcatggcctggaaaagtttctccatttgatgaagaactccagcattagcatatacattgatcatgatattataggactttggttaaatgaaaaactatttttctttaaaggaaatacatgtttatcaaaaatctcaacagatgtaaaggtaacattaattttttttaaaatatcaaaatgagtattttgaaaataaaaattaaattgaataatttaaataaagaatatacaaaaaaaaatatttaacctgtaacatatttttttacgcaaaaggtaattatgtcatttcatccatggtaaaagtgttaatacaaataggaataaattcaaaaacatggtggtggttaaaatacagtcgtgatagccttgcgagagaatgaggaacccgatttgcttgtgttcggattaaacgcacctcaaggttatgaaactcaagaagcttttgtctgcatctgtgaataatctgcacgtcttagctttgaattatcgggtgataaggataaataggagtcaacaacttgtttgcaatgaagctctataatatgagtatatgacgttttgcaaattcaattcattctaattttaatcaaacttaattttagtcccgataattttaaaatcaatcaatttaatcttataataaatttaatccttatgcatcgatttgttgaggaattaaacaaaagttaaattcacctattttttaaaaatatagaaatcaaattgattgatttaaatgacacgaactaaaatcaaatttttaatgattaaaaacctattttaaatcttgtaatccatatctatatattaatacattttattgcatgatttttactttcttttttatctccacgagatataaacatttaccaaatgtaatcacttatgttcatacactttcacatatctttgtgatacatttaatttatataaaacttatgtaccaagaaagaagaaaatacatctttgtaataaaagcaattgaggtaattttacctaattagaaaattatggtagtaattgccttttgtcattcttcctcatcagtcatcccctttactggctcaggaatggggctcgtgtaacccttggaattggctgagtattgttgaacatagccatgcacgtctctatagcctttttcagttagaattaacaatcgtgataataaattaatcattagtagtattaatgattggtttgtttttacagaaagtattaataattaggctagaattacaagttacaagtagcaaaaactacaaatattactcctttttccacctgatttatctctttcgtattaaaattcacctaatttatttctttcgtattaatacgaactttgttataaagtaatcattcatcacaagagtgaggcagaatacaaatgacatgcaaaattttactctaactttatatttgatagtttataggtcaaccattggatgaaacacaaaagatacgagaaaagatacgaaaaataccaccacaacaaaaagcttgagcggagtctatatatacacgaaaaaagtcatctacttattttattatttactctatctcataattatttttaaaatctgtaccatcctaatcaccgattgacctaataaggacagcaacggtcaacgctttagtcttatctcaaagtcatgtttatggtactggtacaaacctacttaggtggtagccgtcgagatctaaggtaacgactagatgataatgtgtggatagtcacgcatgggaatatcagaattaatgaccctagacacgataagggatataatgtggaattgaactcagacgaaagtaggttacacatgtacacttaaatgctctaactagttcgttcaattctagttctacgaacgatttatattggaataaaattaaacatgaaataagtattatacattattaatatttctctctcaacaacaaatctaatgcatgcttttctctcaaatgtatttattgttgtgaaagtatgaactcatatcaatttttaaaactttgatctcaattgtatgcaaactgcatgtggagtatacgtggaagcctctcagattagtgcgagcctatgtgtcagtttgtcgaaaccacaccaagccaactattttacgcttggcacactcgatcatgactagattcgttattgctcctgtgcactgtgctgactctctctctcgcattgccctatatcaatcatatcaccaacacaactcgattacgatgtgatctgctcccaaacctaacctaacaacaaaagcgcacacacacacacaccacaccaacaactcgaatacggcaacaacattgaacaaactaaaaagaaaaaagcaatctcatttccgtccaaaactcgcatccgaatcgcgacacgcacgcggttttcgtttccccatgccattcaccttctctcggttagtttttcatgcgtatccaaacacctatttctccctttatataaacgacaccgtatatgcaactccatcatcgttctaaattaattctaacagtttcggcataattgagcgatcgatgacggcgttgataaggtcaccggcggtgacactggcgatcctgacgatctcggcatgcatcgcgtgtacggcgtcgtacgggggattggtcgggggaaggtcgaagatccctgacgtgaaggcgaacaaggaggtgcaggatttagggcggttctcggtggaggagcataaccggatgctgaggcaggcgcagaaggaggaggaggaagtcacgttcgtggaagtggtggaggcgcaacaacaagtggtgtctgggatcaagtactacatgaagatattgaccacgcagggtggcgacgttggagattccagaatattcgaatccgttgtggtggtgaagccgtggcttggttccaagcagcttctcaacttcgctccttccactcagtgaaatatgatcaatttcggttccctttcaactactattatttaactcataataacatgcttaatttgtttattatgctttaatccttctaatcgtagtaataccaatacatcttgtgaagagagaaataaatgtttgtagtttctgtttcagatatgaataaactagtttgacatatttccattgttttgaatatagagtttctctattttttttttttttaatttactatggacatattttattttagtgaagtcatacttttacaaatatcatttctctaacttttattatcatttataaacgttaaacaacattaacatgaagtaatagtaagaaaatgcatttgtctcaagaaattagaatgtttgagaatcttaggcgtgtattcaattaagacgtttattttatggacaatctttttgtctcgggaatttatttaatttttcctcataatataacgtgacaatgacaatgttatttttgggttccttatatatgtggtcaaaatttttttttagttaattattaaaattgactgtaaatgttttttatattctcataaataaaacacgtctgtttgattgagttattttttcttgagaattatattataattattaaaataaatctcacaatttctaactttgcataaatgttaattaagtttcctatctaacaaccaataaaaaaaaactggaatttccgacgtcggtaattttcaatttcttgaaaagttaatcggtcggaaatttttgacaaatatatctgtcggtaaagtcttgggaaattttcagtaaaaaaatttcaacggaaaatacacttgtggatcagtaaaggataccatgaaaattttttacggttatatcggtcagaaatatacttgtgggtcattactgacacatttttcgtgtcagtaacttattttcattaatttctgtgctgaatacatcacagacttttctttcctctcaaaaacagaataaaataaaatagatataagtataataaggatatttatggatagtttattcgttcagattcagagaaatgctgaaatagaaacatatcaatgtatactatgaatatttattttattaaaagtatattaatatgttatttcatttcagcccattacatacacataacacctttcagtatgtaattgagtatctttcacgagtatatataaagagagagattccaatatatgcctattttgcgtgaatgtaattgggcacataggaatgaaagattgtagtaaagaatgaaatttgtggaaagagaaaattatagtatgtaacatgaaggagcattgagagggtaggaaggagaatttgcttggatttttattcataaagagattcctatcacaagaaaatgaattttcatagttttacattcaataatgaacggaataacttttatagatataataatggtattattaggagctgttttagttattgctcaacaaagaaaaatttggtaagacaatgtctcaattggattatggtattattaggaactgttttagttattgctcaacaagatattaagaaaaatttgatctattccaaaatgtctcaattggattatatgaaaatagctttagaatattggatcttatcaagtccgaaattaaatattagttacatgtgaattataacttaacattgaaatgaaatatgtttgaaattaattattttatcacttcataataaataacaaatatgagataaaaaaattatatttttttttaccctatatttgtgggattacaaaaattatccgtaaaacaaatgttttcttagcttaggattattttttatgacaactaaattttggttgtattgcattaagatttttattgagtaagaccgcttctccatctgtcattattgaattgctgagaagatatatacaatatcttttggtaaaaaactacaggggatcaaaaaattgtacaaggtataatacttttaatgaaagatataagaagatattttattatttagtcattgagtaaaaactttttttaagaaataaaacttttaatgaaagatataataaggacctcttacaatagtgcaaatagcatttcacatttgagtataaaaagtatttcgtcaacttttcctcttcttcaaatcaaatcgtcctctagccaagtagccatacttttttttttatctaaaaaaaattcaaaataagagatctacaataatttattaattatattttaattttatttaaaaatttaaaactaagagagagacacgttgcgtcttcttttttctcccaatagaaataagaataataaacactaaaaacaaaataatattagaaaaaataagaattattttgaataaatatcattttggttattgaaaatgtgagatcacaataaattggtcattaaaaaataaaaaatttaaatttaatattttatgatagattaatcttataaataatttaataataatttaatattaaattaatttttaaaaatataatttatttttaaattattctttaaatattacaagataaaataatttcacaaattcaataataacaatgtgttatactttttatacattcactaaatttaaattttttattttttaagaaccaattttggtctcatccaattttatattattttacagtgacaataactttttttctcaatatagaaactagaaaataaatttattttctcagggacacacaagaaccgtacaggcgctgacattcaaatccctcccatttcccaacccccctaacggctactttcttcattctccgttcccttctcaacccaaaccctactttctcttctcttctccgttctgttctctgcaattgcaaccatgcttccaaaaaatccaatctttcagtgtcgggacactccttccgcacacgctttcagaaaacccagacccacgcgaaagcaaaaatccaagaacaaagagaaccatcctcctcctttcaattcccccttgcccccaaaacctcccaaccctaaccctcttaagcgcaagctttccgaccattccgttccccccacctctggttccgccgtcaaggtcaacaaccattccaaattctactttcttcttcttcttttttaactagttaatttataattttatattctaatttctaggttattgtgagaatgaggcctgcatgcgatgacggggaccagggagattccatagttcagaggatttccagtgattccttgtccatcaacggtcagagcttcacatttgattccgttgctcacactaatgctactcaggcatgatacaagtttataattactttattattacatttaactcgttctccatgtctctctcgtgattttgtgatagtaactgggttgctgttttatcctccagttggatatttttgagcttgttggggcgcctcttgtagagaattgcttggctggatttaatagttctgtattcgcatatgggcaggtttctactttcttcccattttgcgttgcattgtgccgttatgttctcttgttactcgtgattgattatgtttatttttgaaaattttggatagactgggagtgggaaaacttataccatgtggggtcctgccaatgctttgtcagatgacaattcagcaagtgatgaacaaggccttgcacctcgtgtttttgaaagactctttgcttgcataaatgaggtagtgttgagttctattctatttgtgattgaatcctttgatggttatatgaactttgttgtgattttcattgttgtgtttcatgcacaggagcaaattaggcattctgacaagcaactcaagtatcagtgccactgctcttttctcgaggttgaattgaatgactgttgataatttctttctatgtccctgtcctgcttgaccttgttatctagtccttttgatgtgtgaacttgttttgcagatatacaacgagcaaatagcagatctattagatccaaatcaaagaaacctacaggtaaaatctattccattatagttttccctcgatcatgcttaaccaggttatactagaactggtcttttgatgcttattcagattagagaagatgtcaaatctggtgtctatgttgaaaatcttacagaggagcaagtgtgtacgaagaaagatgtgactcagcttttgataaaggtgtgcttcatcacacttgtataaacagttgtggtttccatttccctcttctatcactgttggctgttgcagtgttgcctattgcctatttaactattcaaccatttcattatgagtaaactatagaagtcaataaaaatataaaatagattttcttaaaggattaaaataagatccaaaaactatttatcaaggactagtttgtctttatttcttccctcacgctaaatggcaacaaaagtattagaaaaagattagaattatatattactactgcattagagaatcaggttcttaaatatgtggaagttgaagaggttatggcagcatataacatcagcaacaatgcttcatgaacacctagcatgtgttgttttcttaacatttagagtttcacgtgtcagttgtcaaacatccatcaatcaacaggttgaaacatttattttttaatgttctttcaccatagaatgaaaagtaaaaacaacatttaagggtcatatgttgtacatgcctcacttgagtaccccatgtttaaactaaatttgtcatctttgaaattacactgaatgagtacttcattactttttttaacaagtatttttgtaacaaatgtggcagagcttcattttgagcatatatgactcattacataaaaacaaaaatttccattaaggtagaaccagttgatttaatcagtagtaggagaaatgaaatgctgaatttctctcagtctgacttgaatagctctctctcttttcgttttttagacaattgaccattcttatatgcttgtaattatcaagtttttcctttccattctgttagggccatctcttctgtaaatgaatacagcccaatgtaactatctattctagacgaagaagagtaggtagttagtgggtattatttggtctgttagtcagttagaagaaataaacagagagctgtaattgagaaataaattatatatttgtcgagttgcacctgaggcagtgttgctctgtggaggaagaggatttcctttgaggagagtcatcccctgatttcaatttttcaatacagaagagctatattttgtttcctattctctatctccattctttataattttgtttctaaagatctcaagagcctaacacattctaaagatctccaaatttcataattgccatggttttcctttgtccttttctcttgtgtttttactattatatacctttcattatacagggtttgttaaacagaagaattggtgcaaccagtataaattctgaaagttcacgttctcatactgtttttacttgtgtggttgaatctcgatgcaaggtgatgcactcttctcttgtggcttggagatagtttttaataatattagataggaagggcagacattttacaatctttaactagataaattttaggagaaactacatatgcaatattgaaatgtggaatctagcaatgaacttttgcttttcagttcttctgtttttcaaaagaacttctgttggcaagatatttttcagcttcacaatagaattgtaaaaagagaaaagaggtattgaagcgagtccatattttcactttgcagagtactgcagatggtgtaagcagatttagaacaagtaaaataaatcttgttgatctagctgggtcagaacgacaaaaattaacgggtgcagcaggagaccgtttaaaggaagctggcaatattaatagatccctttcacagcttgggtatggtttaaaatgtgtgtatacattgatgtttgatattggaattgaaatacaaattactagcaatcacaaacgaaaaatagcttaaatacaaatacaagttgattttagcttataaagaagctcaatgcattttactttcttatttttttcctataaatacctatggagaattttatccaaacatggcccattttgtggtgatcaaagaagaaaaatttggtggcaaattccaaagctgattatagaagcttggcccaaacttcagctgagattctatggattcggtcattgctcaccaaattgcattgcatttttcagactcctaaaaatcctgtgacaatttgagttcagtggttctctcacaatctgctgcttcactcttgcattaaacaaatggagttagataccttttttgtttgggaaaggttctaagcaagagcctactactccatcatgtcccaactcatgattactgggggtggatgctttcaacgtgcctctctcttcactgcattttcatgttttcagaggcaagatcagagtgtgtgacaagtttatgtaatgtaaccttgagcttaggagagagagagggtgggggggggggggggatgttagttggtgggatacagtgtgttaggtcaatctagctcattgggaatggacagggaccagttttcctttaggtagttaacccagctggaagctacgcgcagcggtttggattcggtaaatgaatgttcgctatcacattagttgcaattgcattgtaatcatataagtacctgtaatctagccattttaaatcagaataaaatattactgaagtttactcgttctaaaaaattctctctctttgcatcttcaatccaaacaatctcccatagatttgtgattcccattcaacattccccctcaagctggtgaatagatactagtcattcccccatgatagatgaaatatgaaatgggcataaaacctagatgtgaaggaaagggaaaaagggaagttgttaggtggcatttattccatggtctgaaaattcctgactgccaaattctaatcatccatgatccaattacttactgaggttgaattgtactgcaggaatttgataaaaattctagctgaagtttctcagacaggaaagctgcgacatataccatatagagactccaggttgacatttttattgcaggagtctcttggcggaaatgcaaaattagctttggtttgtgctatttccccagcacaaaggtagatatcaaccattagtgatttgaacttctggctcttaatgtatgctggattatttctcatggcttaacattgcagttgtaagagagaaacttttagtacattgagatttgcacaatgtgtaaaggctatcaagaataaagcagttgtcaatgaagtaatgcacggtgatgtgaatcaattacgagacgtgatatgccaactcagggtaatatctcttcgaccatgatcaatcatttctttatacctggccagtacatttttttttcaaataacttataactgtaagcaatcaaacaggatgaacttcatcgaatgaaagcaaatggttacagtccaagtgatggaagtcgaggtcattcagcagcgttgatcagaagaagtttgaatttgctgaagcctaccctcaatcacccattatcactacctcatgttgatgaggatggtgatgaggagatggagattgatgaggaaggtgttgaggatcatgctgtagttctccacaactcaaatggaggttttgctggtttttcagcccctactggatctattggttctcctagtgctgcaatgaatggtgacagccctgctggcggcatggttaaatgcaaaacatcccccatcctcaaaccccctcctcccagcctttcaccaacaatcagcagcagcaggaaaagtttgaggacctcattaaagcagtctccttctgagaataattttcatggtgaaagtgatttaggcacaaacaccgttaaccagaaatgcttgtctactgctctctccagccagacagctccaaatttcctaactaaaactgaaaatttagcagtaagcatccaccatggtcttgaaattattgatagccaccatcatggtgcatcgttatcgagtctctcattgagacccaaagattccaggctcattattcctgtggaaaaagttgatgtcggagtccagactattcttgatgataatgccgaaaaggaagattatgctatgcttacctgtaataactgtaaaagccgaatgcagcttgatgtcaatgagattgacaatagctcaaatgtgcagctggtacccattgattgcccggagtcaactgataaaccaaagaagcaaattctgaaagtaagtgcaaggatctcagcttcattttctggtatagcttaaattcaatctattacttttcatttctttctattataatgtaggcagtagagaaggttttggcaggatcaataaggagagaaatggcattagaagagttctgtgcgaagcagacttctcatataatgcagctcaattgcttggtaagattctgtttactgacaatcatctgtggtcattgttttgtcttgtattgtgactattttcaatcatatttgtagttgcaaaagtacaggcaagagagggaatgcaatgccacaataacacatacaagagaagataaaatcctacaccttcagagccttattgatggtgttttatccaccaaggagttcatggatgaagagctggtgtccctcacacatgaaaacaaggtagaaataaattattttaaggttttatttttatgattactatctttgatgcttatatttaggacttgcctgctatcaaaattcaacagcatttaaaggagaaccatgagcatcatttagaagttctgaagatgaagatagagttaaaaagagtacaagatgagttacaagagtatcagaatttttaccaatttggggagagggaagtgttgatggaagagatatgtagtttaagaaatcagcttcacttttatgttgactcttcatccacatccgcaacaaagcaatatactccattgcaattgacttattcatctgaacctagtttggcagcaaacctaactgccattcctgatttaacagaggctagcactaaggcaaatgcaaatccagaatcaactgaagacagtgccaaagtaaaacttgaacaggaaaaaagtcaatggactgaggcagaaagcaggtggatttctctaactgaaaaactgagagctgaacttgaagctagcaggtcactagctgaaaagaggaagcaggaactagatactgagaggaagtgtgctgaggaactgaatgaaacaatgcaaatggctatagaaggccatgcacgaattttagaacagtatgctgatttagaagagaaacatatccaattgcttgaaaggcatagaaagatccaggatagcattgatgatgtcaaggaagcagcttccagaggaggagtaagaggtgcagactctaaattcataaatgcccttgctgcagaaatttcagcattaaaagcagaaaaagaaaaagaattggaaatcctaagagatgaaaatagaggacttcgagctcaactgaaggatactgctgaagcagtgcaagctgcaggtgaacttcttgtgcgacttaatgaagcagaagaaggtgtcattaccgcacaggtatataaagaatcaatgtgtatattcaaatttcaactgagcaagaatcaatgtgtatttacacataccattttaatccctatacataacatttttaatctcttttagtctctatcgtctaaactcataaggactaaaacagattaaaaaaagtatgtatattcaaatgtgtatttacacataccattttaatcccttttagtccctatacataacatttttaatctcttttagtctctatcatctaaactccataggaactagaagagattaaaaggtatgtataaggactaaaagagatgatttttaagtatagagattaaaaggtaaagtttgtacaactatagggaccaaatgaataaacctttattcttttatgctgaagtctttcactctcacaaatgaatttctagcaaattttatgtaagagaagcaggtcaattttattttgctacagctgatgcatacatatagtttaacctggtagtggagatgtttttgaaagagctgggtcagctcagttctacttgagctaattctataagatgtattaacttgcagaagcgggccatggatgcagagcatgaagctgcaaaggcctacaaacaaattgataaattgaagaagaaatatgacaaggagattagcacacttaataagctacttgccaaaacacatttgcctaatgaagaaatacgacctactttggatgaccttgtcatgcctacttgtgatgacaccaaggtgccgaacaatgttaatggtcaatttgagttattttgtaacgaagaggatagtgaacttgcaaatttggcagaccaatcatggttctcttcttatgacacatgcaacatatagattaatcttccagtttgtgttcattgttcatatgatttgttcaagaagaaaagccttattccactaggtgttcatatgatgatttgcgtcacaattgtctcttctttacatcaaagcctattttgatttagcctaccggggaacttttgcatttatctgttgcggggaatcaatatccttcagactttgggttgttgacattaacgaatcattttaagagcttgggttctaaaatgaactatgtgaggtatcaataccatttaggacttcgggttataaagaggtacacaaatgaactaagatgataacaattttagtagaaatgtcaaatattgtcagaaatttcaataatttgagctaacgcccacgatatatcttggttatgtttacgaacatttgttttgactcattgtagctcaattttattatgattttattgttaattcattttcttttaacctttcatttgtcaagaaaccacatttccccacatttaaaacgcaaccgagatttgctaatctatgaaagtaaaatgccaatcctcaaaatttgatttacattaagttatacaattgcgtgttcccgagaactttgaagtataaagtgaatcaaccatatatatggtaaaactgaaatacaactccgaccttgacaattttcaaaatttccagatcttcatgaaatctctccatcatccatctcagaatcatccccaactaaaagatcctcgtaatccaaagtaccccgaggctcaatctgcacatgcaagtcccccacttcagaatccctctgatccaaaaccaaaccatcatgatcctccacatcagactcatcatcactgcatacctcaagcttctcttcttcctccctctataacccacaagccccaaaaccttctccttccacagcagcaaggggcatttctcaatgagctcagaaccctcataagcctcagtcataacctcttccccctctcggacacatagaagatcccacagtgcttgagcagaagcctcatcggcttctgaggcatcacaagctcccaacgaaagtgtctgaggtgatcggtgaccaacctcttctcaatagtgaaactaagcagttcatgcataacagcaacagcccttttatatcaaactccaatgatccagccttaagtccacgagcatcagcatagggagacaaataagacatctcctgaaaattctgaatcttttcaccatagtaacgatacaccctctaagagttcgcagggaacttcaaaggaaatggaattgaaagcattcctggggtattggtagtttcactttcggtagtttcagttgtttctgtcaccacctttttctctaactcagtgattgcccaatcagggttccaagatacaagctccaaaaactcaaccccttaaaaagctgaggatacttatgcgcccaatggactctataatccacggcaacccaaaatctcttctgaaatgcgcaatcttctccaagggaagccttttgtccagcgacatcatgagaaacctcgtgacgtgttcggcagctttgtcggcgtgttcttcgatgaccctttgttgttccatcaagttctcggcttttggggtcatgccgcaccagagcacccccttctggtccttgtagagttcgaagaggttgggagttttgcggaggaaatcggagacatgatggggcttggggaggttgatctggcggcggtggtggtcgagggagcgaacgggaatcaccatttcgggatcttgcttgagaagctccattaggtagatgattttggaggctatttaccatttctcggttgtgacttcgaggtcttgaaccctcttcttcttgctccttctgtcttggaccctcttgctgctcactgtggtaacaataacaaacccttgttctccccaatcaccaattagtacccatcaccattaccatcaccatcaccaatccaatctagttctcattctcaatctcatttgccaaggtttgaacaagaaggccatatgttactgacggttgttgcttcctgcattcccagtgttccttactgcacttcccataccattatatttcctaatgtaattagttttacccgttgctgacaagtgaaatgagcccagcactaacattgttgggcctcggcaggtccggagtatgagctttactattcacacctcaatagttacttttggaatgatggagatgctcgtggttggcataccactacatgggaggtggacggtggtatggggttcaagaagttgcatctttacaataagacttttatcatgaagatggcttgggagcttattgcccagccggaggagttgtgggtgtaggtattaagggccaaatataagtgctgatcaaccattatctcggttgttaattgtgggatgcatgattcctaaacttggaaagctattacgtggattgtgggtaatggttcccgggtcaatttctggctagacaattggtttccatcgagtatgttaatagctctggtgggtggaaagttttggagttgtaggacttccttccttactggcctatccaggagattcttgcttatcctacccctctccctgctcatggaaggtttgggggagctactactaatggaagttttactgtgaaatcaacttattcaatctcaaccaattatcacagtattcatggctctaacaggttgcagacgatttggcagtggaaagatcctcatagaatttggactctcatttggttgattgctaataaaggccttaaagactaatgtcagaaggcaacattgtggtatattgatgatcctctgtgccctttatgcaaatctattgttgagactgaattgcacattctgagagattgttctgatgtcaaacctatttgggaagagcttggcagggatttttttcccttctatgcacagcttcttctctatgtctcttgtcgactggttgttggggaacacggcaaaggggcttcacagatggagattaatgtttggtattacggtggcttctctctagtatgccaagaactctcttatttttaagaatcaacagtggaatatgcagggagttactaatagagtgatgttacagaccctgtgtagccattggttggaccacgtacaccaactttataagtggaattccaaagatatgtgagtgaacgtctccctccaaaatttcctgagtttcccatgctcttcatcatagctttcttgttgggtgcggtttccttttctaaaaggagaaagactcaaatattgtaagccaactatgtgtctcatttatcgagttgagaaggtcaaattaaggcatatgaggaagggttaatcaagtaactatgcagcagctttaaggagagagaagagaagagtgaaggtttattattgtttagttgtttgatttactattagcatactttgtgcttttgattaagaacattttattcacagttaaccataatggaactcttagtttagtttatattagtcttaaaccgtacgaactcccgaagtttttatcctttattttgattttcaggttctttttttcccctagtctttcattatacaattctttttaatcatatatttatgggtttatacttacgagtatctttaaaatattgattaagaaatttttaaaaatattcattatgtaaaacataaaaaaattatgaaaaacacaatttcacacattcaaatattttttttcttttaattttttaatcaatactctaaaaacatttgttaatatttacctatatttatttagttacacgtcacatttcttgcttgagacaagaaatttatccacaatgattatcattattcccatgatgctgaatacttttctcacctgtaataattatcttcacaatatcatcattttctttcacacttgagtccacaaaacttcctcgtcacattttgaaattgagaaatctcctcaatttttattcacttcaaaattatcgaataaatcttataaaaggagagagagaaaaagagaatcatcgaataaagcgatatgacaggaataaaaatgtgtcactgcccctactcaattatttattcagatactgtggacagcctgagaatcacgttggagtatttctagatattttatttttcacggccataatgattaagaagcacatatagatacagaaaaatgcagttaactaaatattatatcttggtgctttcatggcgtgcaacacagtaggatgtttctctttgtttttccaactcattcttttaatccctctagtcactttgggattctcaattgaagaggcaactgtatatgatctccaacttgctttccgtagaaaccaattaacctctaggcaactcgttgagttctaccacaaacaaatacaaacccaaaacccagttctgagaggggtgttggagttaaacccagatgcactagaacaagctgacaaagctgaccatgagagaaaggctaatgcaccagggactcttccagcactgcatggaatacccattttggttaaggacattattgcaaccaaggataagatgaacaccaccgcaggctcttttgcacttcttggctctgtggtgcctagagatgcaggtgtagttaccaggttaagagaagctggggctatcattttaggcaaggccaccctgagtgaatggtcacattataggtcgaatgatgcacccagtggttggaatggcagaggtggacaaggaaaggtgattgatttacttgctttttctgactttaatctgaccttgttcttgcttttcaactcaaatctatctgtctattcttgatgatttgcaaaagtccatagtaaagtaatctattatattattatttgtgttgtgcagaatccatacacaatgggtgatccctgtggatctagtagcggatcagcaatatcagtggccgcaaatttggtggcagtgtcacttggtagtgagactgatgggtccattttatgcccttcaggttctaattcagtagtgggcattaaaccaacagttggcctcactagtagagcaggggtagttccaatctccccattacaggacacagttgggtaagtctatggactatggtaatttcaccattttcttttgaacaaattacactggaatcttttgagctttttccgaaatacatacaatatcatttttttttttctcttattaaactaactcctttaatgtttaaaagcattatactcatattctccttatatattacaccaactcccttaatgatttaaatttgaaaacaacactcctataatgaaagttgttataaacattaaacaaagaatagtattttgtgtaattcgaaaaattcttaagaagtattaatgtaatttgctatttctttatatcaaaactatatgcactttgcaagcattattacttttcccgtcaaaatacattttgttgcattaaatgtgtgacttcttgtgggctggtacagaccgatttgcaggactgtatcagatgctgctcttgttcttgaaaccattgcaggaatcgacatcaatgataaggcaacaatcaaagcatcaaagtatctcccaagaggtggctatgctcaatttctaaagaaagatggactgagaggaaagagattaggtgtcgtaagaatattctacggttttggaaatgacacttttatgcatgatactttcgaactgcacctgaaaacattaaggtaatgaaaattactatttgtgtctagtattaattattgattgcattattcagtatcatacttatatttttcaaactcaggcaaaaaggagcagtgttggttgacaatttggagataaacaacattcaggaaatctttaatgatcaaagtgaaggcattgctctggcatatgaattcaaattatccttgaacgcatacctcagagacttagttacttccccagtgagaagcttggccgatgtgatagccttcaacaagaaacacccaaaattggttagtatgtaacaaagcccctcctatttacttgttgatgattaaaatagatatggtaaaaaaatttgctcaaaatacatcttgttgatgaatttcgtccatcattcaaatatattaaattctataaaggaaggcgaaattcatcaattatcaaatagaaataccaacattatgttctttttaacacgttctctactattatccgaattttatcggactaagactaattttaactgaaaattgatcacttaaatctcatttctgttggatatggctcatctttcgcagtcagatgacaacccttcttgttggcgggatcagcagaaagccaactggtcttttaatcctatttatattccccttgtaaaccgagtgacttgtaacgagtgacggtgaggagattatagtacagacaagctggacgtagtctacattgggtaaaccagggtaaaatactgtgtcatatttctcttccctattctcttttctgttttttagatttgtgtgtgattgtcgatttccaacaatttcactggaatagatataataacattggtatggaaattgcaggagaaacttaaggagtatggccaagatctcatgttgatagctcaaaagacaaatggagttagggaactgaaggaagcagtgttaaacatggcaagattgtcacatattggatttgagaaattaatgataacaaataaacttgacgcggtggtagtacccttttcattctttgttagtatacttgcaaggggaggttatcctggaataactgttccagcgggatatgaaaagggtgcgccatttggaattatctttggaggtttgaaaggctcagaaccaaagctcatcgaaattgcttattcctttgagcaagctactttgatcaggaagcccccaccacttctaaagttaaaggtttaaccgttaaaaaaaaaaattgtcagaattatgatggaattgaatagccaattaagtgtttgtttaatgatggccgagactagttatgagttatatccatctaagaataaatttaagtattgtcatgtccttctatcagaaactctgacaaaaactataatgtggcaataagattcgaagtgtgtctatttagctatctgagttcattgcagtggggatttttggacttgtattatgcttttaccatgaaataaaataaatcaaaatcctgaagtgctatcaaggctcggtttaataaggaaaaatggtctcttagattccttaaaagtatatacgagaaagagaaaaagaaaaatgtgaccaaaaagaagagaaaaatctctaaaaaaaaagagagagaaaaagagaaatataaagatgaaagtaaaaattaaagtatgaaaaaaaaatagttttaaacattgaaattgaattgtttaaatatatgagcatataattttttaaattttgttcacgaaagtttatattcaattaaccttcttcaaatatatttatgattaaattatactaattacttttgagtttttgtaaaattattcaaattctttttttaaaacatatacatcattcttccctattttttaaacaattagaagaggttagttaatatataaagaatattggtgtaattttgttaaaaaaattaagagaattattacagtgattgaaaaaacagtaagaatttatataatttcacaaaattttgtcattttcattcatataaatttatattgaaggtttgatacaaccttcataaaacttatttaaatttctatttacaataagatatgaaaataagatacaaaattatctttcaataaatctatacgaatgactttttatgtatattaacattttaacatttaaaatattaataaatatattattttattttaatatggtatgaaaaaactatattgttataatgcaagtttgagtcatattcaattttataaaactaacttataagaaattattttttagtgattaaaaatgggttgaaaatatttttatacgtataggaataattaaaacatgtgtttgtttaacattttcttatcctaggaatgtataataattactaaaaatatctttattgtgttaaagtttgtttaaaaaatatataattgtgtccaaataggtataaatataaacaacgcacaggaaagttccaacaaataatgccaaaaaaaacgtcactacaactcatcacggtccctttaatttgcatcctcacgctttaaaactccagcctcgttgttgccacaaaagtacatgtacacttgatgcaaatcaaatagtaaaataaaaaaaaacgtaacttcaagagaatagtcaatttagagttacggtgttaataatataaaaagttagaatacctttttaaaaattattgtgaataacacgcatgaaattgacacaggaaaaaatgggtgaaaatgagaaaaattaaaacacatatataaatggagttgagtagtggatactaaagagaatatatgtatatttttattcactaatggggattttatgttttatgggaataaatattttttatcattaggattaaatattgatggaatgtgagattattatttacccatatacaaaatataggtttaattactttgtggtaccttatacaaaatttttaattaggtccctcaacttatttttcttttaatttggtccttcaacatttttttttcaactggatccctaaacttttatttatttttcaattgaattgtttcatctaattatcgttatgaaaaactaaccacaaatacttaattataggtactgatagtggactaatgcttttagaatgtgttgtaagtacaattaagtcaattgtgtgagttttttttataaagtttcaaccttttgcaaaaccaaataaatataaagaaatatctaggttgaattgacattaaaagatagaaactttgcaaaaaagtctcatagactcaattgtgaatataacacacccaagaagaattgttttcctgtctggagttctaattgagtctttgcggttaatttttcataacaacagtgaaatgagggatccaattgaaaaactaataacccaattaaaagaaaaaaattaggaacctaattaaaaaattggtaaaaatatagccacttataggttaatttaacctaaaatatatctaagattaattattttattatttcgtaacaaaggggagataattttttccactccaatattctcacgactaaaaaatttagccatgaaacaaacataccctaagtgcttatccatattatatttgggccagttttaagtttaaataagtattttaataaatatttttcaataaacaaattagatttattttttaaaataagtagaaaaattatttttttaagaagaagtagtttagacaaacacaaaaaaaaaataaagatttttactttctaaacttttgtttgactagttaagatctctaaaattttagaaatttcagtttatagtttctcaacaaaagtttaaattcattatttttatttatttattgggattttaaggagtaaagactgaatttttaaaagttatgggactaaaaaaaatagaaaaaagttgaaaaatcttcaccaatcaaactaaattttagagattaaaatcttaataaaaaagattaaagaaccttaaccaaatcaaataaaaatttaaaaataaaaaacgtagttaatccttaaaatatagttactcttatcataatacaaattatgccaaaaaaaacatcaccaaaactcatcatggtccctttaatttgctgcctcatgctttaaaactccagtcttattgttgccgcaaaactacatgtatacttgatgcaaatcaaatagtcaaccaaaaaaccaaaagtaacttcaagaaaatagccaattcagaggttacagtgttaataatataaaaatttagaatacctttttaaaaattattgtgaataatataaatgaaattgaagcacatatatacatgaatgtagcattaagagaatagttggattgtggataataagaaaaataatatttattcctttcgttggaattaaatattaattaaaagtgagattattgtttatcaaaatataaaatatcaacatcaacaacactttaaatctaagttaattgagatcggtgatagatgaacccaataataaataataaaagagacagaaagagaaagagagaggggaaaaaaagttaaaataagaaaaaagagaaaaaagaggtgaaaaaaagaaggaaaataactaaaataagggaataactggaacataaaactactaatggtttaaccctctactaaacttataattttttttcactccgtcctaagacataccgtccaccaatctatatctaactccattaggttttatttaactacctttccccaggtaagtttcggttgatctctaccttttttgtatcaaactcttggtaacaaactcttgttcttacgggagcatccagtgccagtctcataacgtactcaaaccacttcaatatatgttctctcatcttttcacatatcggtacactgatacatttttttgaatattctcatttattattttatccatcttcatatatccacacatccaccttaacatcctcatttttgctatccctatttttgttcatgttgccgatgtgttggtcagcattatgctccatacagcattgccggtctcataacgtactcaaaccacttcaatatatgttctctcatcttttcacataccagtaccactgatacctttttttcgaatattctcatttcttattttatccaccttcatatatccacacatccaccttaacatcctcatttttgatatccctattttttgctcatgttgcctatgtgttgaccggcattatgctccatacaacattgccgatcttacaattgttttatagaattttcctttcaacttaaggagaattttgcagtcatacaaaaactccgatacattccaccatttcatccatcatgctctaattctataatttacatgttcatcaatgttaccacctttttttaacattaatccatgtatcatttatattttgatatattttctaccaaaatataaaatatattcaagataaattgtgttattacttcataacaaatacaagataatttttccccttctatatttccaaaagtaaaaaattgacccataaacaaacatttattaattatttatccatattatatttgggtcaattttaaacttaaaataagtgttttaaaaaaattaataagcaaattggatctacttattaaaatcagcagaaaaatacttttttcaaacataaatatttaatttagacaaacacattaaaaaaacaaagaaaaatacttattttattaaaataaacttgattgtgatattgtttttaattattttagtaaagtgtcttatgtgatccgttagatatgatctatggctgatattactgcagtagggagctcgccgtagagtattatttgccgtagagaatccgaacgccaccgtgaatgtaaaaaaaaaaaaaaaaaagtcataataagatgaaaaaaaaattattatagaaaaaaaaaatagttactcctccaatgaccttcatctacatattccataatttgacagatacttattgaattatagatagtagacacgcatcgtactcgaacccagtttcttatgacaattgtcataagataattactgtttaaataaaatataacaactctattgtataataatgggtgaaattaaaattttataaattaaagtcgagttaagatcaactaagatagtattaaattataactataatcccaagttaaaataaaaaatattactaaatctaaaatcgtagatatatatatatatatatataaaagactgtagaaattatttaaataaaaaaaaaaccctattgtataataatgtgtgaaattaaggggggctaaatatgtgattttataagatgggaataaattatggcattttatagacatttaagaattaaattagattatttttttagagattaaattattatcaatttatatattcagaaatcaaaataattatttatcctaattttatattcaatttgttgtcacatatatttggtaaatttaacttataatttagctgaaaaaaaaattataagttaggaagtcaaaagttataaattaactgatttaatcattaaaagtgtttgataaaattaacgtataaatatcaaataatgtagagaacctatttaatatgtttaaatatatttttaatttcttacaatttaacttttttggttttttgttattataaattatatttattttatttttcatccttataacatttcagatagtattttattgtccttatatttattttatttttagtcgttacaaattgttttttaaattattaaattttattatataaatagttataaactttaaccatttaaaaaatacatttaagaatgattgtactaaatgattatgtgattaatgtgtggttatgttaagatgacttaagaataaatttttaattcagttgtaataattttaattaattatgttactaatgtatttttttattgacttgataatgttttttaaccgtgacaaaaattaatatttttttttattgcttttgcacttaataagtgcggaagtgatcgtgagtatgaatatatatgtatgtatgcagtgggtaagataatgaggtttaaagcttctacatgtacgaatttgggaataaatattataattattaaaattttctttcaaagacacttttatgattggttaaaatttttaattttggtaaattttagttctcaatttaatataaattaggagaaataatcagaagaaaaatctaacaaaattataattttcaataaattatagcaaaacatagaaagtcttagaaaaaaagtattagagaaaaacattaacatttatcatactataatctcatactggttatcatccttacaaagatttaatgcaaaagggtattataataaatccctttttggatacaattaaatttcttaatatgattttcattctcacaatgaagtgtatcattaatttagagaataatggagtaatttcttaattctctctaggtataacataagcaaagaagttatttgaatataaagataagtttttttatgtgttggtgtgtcttattatctcttttgtttgtgattattaaaacaaattgatttttgttttagatccttaaactttttatattaaatttatgatatattaaaatttttattttaaattttttttgtccattaatgacgtgtaataaatgaacttttatttatttcctttcatttttttttcatgaaataaagagagggttaaaatttgctttcctaaaaaaagagggttaaaatttatttccattaaaattttaatttaaagtaattaacattttgaaattttaaaagttttctaatatagtatattttttaaatacatttatattcttctgtaaaaaaaaacatttatattctgttttgtttcaaagttatttccgccgtcacttttctctaataatatatattggttccccattttgccgttgttcactcctctcttccaagttctgtctctgtatattcaaatccatactatcactttcgcttcggtacttctcttttcattgtcgcacagacacaaatcagcaccaaacgaagcccgacactacgtgaattaagcatggtaagattcagcaaaacccaatcacatcttcaattttcaaaactatttcatctctctgtcttcttttagggttttcctccctttttcatttacgttttgttctgaatgctctttatgatatgtaaatctttttttttttttttgtgcattttataattgacacagtcgggcagaaaagaaacggttttggaccttgcaaagtttgtagacaaaggcgttcaagttaagcttactggaggcagacaaggttaggttacccaattcccttctcttgtgattttttattttttaaaatggttaatgatttatgtattgattttttaaaatgatggcggaagtatgaaattcgtttcgttttgaattgcaagaactcaattgagagttagctttcataattaaaatgcaaataaactcttctacatgtatattttttgttatgttttgttttgtttgattgcagtgacagggactctgaaagggtatgatcagttgcttaaccttgtcctagatgaagctgtagagtttttaagaggtaactaaacaacgcagagatctagtttttctgtttatcattttaatggtatatgtactgcagtagctctatttgttactttcttattatgttcgtgacttcatgatactgcttttccagccttttcagcgaattttgctacaatctgctaaaatgcaaaaaatttctttcagggctagggggcaaaatatttgagttttcatctatacttttggttgattccttggattatttgctcattatgggtgaagtttttttggtgtgatgatttacgccatgaagctgcttgattatactttaactttacagaattaaatcactatttgggtatttagcaaattagtgaaaactacataaagggacttataccgactgagagtgaaatattgaatgaataacaactaaggagctaaataatgccatttttatcatcatttccactgcttctataattaagggagcgttctgaagggcttgtttaagcttatgaaagtagcttatttatctatctatatgttttttgtatttgtagtttattcaataagcttaactatgatccttatcaaaataagcactttttagcttatttcattaagctctgtaaccaagcctatatgggaattctcattttataagagtttagtgaataaatgcttaatcaagttgtttaccctaatatgccccaagtgcagatttagcactgaacttttagttccaaataacataagcattggagtggaagatcctatgatatttaaatttttttctcactttgattaagcccttgatttactcattttcttaattttctgaatgaattcagcatcattttacttatttttgtttcagcaccgaattcaaaatggaatttccattcagaatttgttcagtatagtgcagaaccgaattattgaacactcttagatgaacttggcatgtcaatacaactatgcatattattgtaccttctatgtgtcaaaagaacggatttaatttcatagttcaaatgtttgtgtgactctacttactatcagcattatgcttgtttataaactccaccaacaaaatttaacatattagcttattcttaaaaattatctaatatttcatttctgttgtttgaaagaagattttatttgtcccttgtgctgcagatcctgatgatcccctcaaaactaccgatcagaccaggaatcttggcttaattgtaagctctcctcttcaacatcatataaaaactaaaaataattacgtacctcattgctcagaggttcctcgctatgcgaaggtaagagggagagatattgtacgcaaccttacccttgcatatgcaaagagactgtttccgtattcgaacccatgaccaataagtcaccaagacacaactttatcgctatgtcaagactcgctttcagaaaaactacatatcccattgtccagaggctcatcgctatgcgaaagtaagggggaggaatattgtacgccgccttacccttgcatatgcaaagaggctatttccggattcaaacccatgaccgacaagtcaccaaggcacaactttatcactgtgtcagggtttttcctcttcttcaacatcatatgagtgtcataattgcaccttctggctcataaaaagcttgctttgctgatgtcgtgcttcattgaaattttgcatctttgcttctttggatactagggaagtttaataaatcaacaacatcaacatcaacaacacctttaacccaagttaattggggtcggtggtagatgaacctaatgataaatcgaaaataggacaaaagagagaaacaaagttaaaataaaagaatggtgaaaggagaaaagaagaggaaaagaactaaacaaggaaatgactggaacatagaactactaatggatttaaccctccaccaagcttaatatttattttgtatttgtaagaaaaatatcaagttaattaattagaattacagtccaagtacataggagagatcaattatatactcttgcaaaacattaagaacatgtcatctccttctaaaaaacattaagaacatgtcatctaagtgcattaggagagctacaagaaaaggaatttaaaatatgtttctgtaattttctattaagaattcttatataataaagcaattgactgattctggccatgttaaattgttcatcgagggtgaaaagttgtactttaactctattatcagtttttttgttttggtttatagatgtgtatgctgattgtttaaattttatagaatttaaaatatgcagtgcctctagtaaatgtacttatgataggcccttaacacatgtacaagagcataggaaaatatgatttgcccaatggtagcaaaggcctgctggtttatgagaggaacaagaataataaccgaaaggggaaatttcagttaggagagagagagagagagaggagggagagggagagggagaggggaaattataactgaatggtgactggcagcatgagtgtgtgggagtgaggagattcaggaatcagtattaaataaggggaaacagaggtgagaggataaatgttggtgagggtctttgagggttggttgcactacaacagtgtcagtcatatttctttccttttcttgagtattctattaccagaggatttttcattttttcctcagctgtagcctgtacggagctttgctccctgatttctcagttgatagtattcagtatattttaatttctacaacctatcactacataaaagcatttcctgcaagaaaagaaaaagttgataattcacatgactataagcacttcatccactagcttttttgaattattttatcattatctttcaacaggaactattttggcttagcaatgaatatttcattatcctgggaacttattttattgcaatgcaggtttgtagaggaactgctgtcatgcttgtgtccccaactgatggtacagatgagatcgccaacccctttatacagccagatgggtcctaagtgtgaagtatttctatcttaaaatctgtatgctagctgatcaatacgtcgtcgcttagctgctgagacattaatgtggagcttctgattaacgttttgtctattgtgtgtaagcttggagattctgacccatttcatgttcttgttctgatgaagtttatttctctgtgatgtgtcttcagctacactttgaggacttaatatttatcatggattacaattgcacataaattagaagctaattctaacttgaccagaatgaaagttcttcatggcactttatatgacacttcccttcctcaccattcttgttaatcaatcttaccacacatacacgcaatctagtctagctgttacaggttagaagagacctagtaatggagaatttggatagcttccacaaagttttagattctaaccttatactgtgtttaaaaaaaaagttgagcgaacactaattccaaaggacgggctactctattgcaacttgtacattttcagttctttatctgcttgaagtgtggaaatgtctattactattaggtttggccagaggagaaaatgaataattgagcaaggatgggtttgaaagaaattttctaacttttatccgtaaagatttttttaagtaattataaagatagtgtataaaatacgcatttttaaaaaaaattcaaaatgtctagttgaaagaacaagagaatgaaaattttaatctctaaattatatattttaatttgtaatatttagttataggtaatatactaattaaaaagatgaggattgagatttctttacctatatactctttttggttgggttgaaataccatgaaaatgtagaagtgaggaaatagagtggatagttaaaacttaaaactcatcctggtttggcaccaatgaaataataaggaaagaattgtaggtctcatgtacaaaaatttcatccatgaagtaaggaaaaatagcttcgaaactgggagaagtgaggagaaatggcataaattagtaatcatgaaatatatcaagcaaattttttttatctttttcttttatcttttttatttcttctttatttttattaaactaaacaactttaaaatttactttatttctgtttttcctattaattctatccgttgtatttcttttcttcctaccagttaaatcctacatgcatttataaaaaatttcttaatttaattacaattcttagatcttagttaggaaagtccactttgctccctactcctaaacacttattaagcaaggagtttggaagcctggtgactggtgcgaattgaaaacggtgaaaccacacggtaccagagaacagaacaacaacagctgcagcagcaggacatcatgtgttggggatgttgactttgttgttagtcatatgtggttggttagattccattaagttgcaacctgtgattattttttcaggtcgttttacttacgtgcatgcatgcgtttgttggcgttggaactaatggtattcatgagataaaacttatcaaaagagtataaaactaagctacaatgatccgtttccaacctcttgactattcaatatcttgacaatatataatgtttaggttcaggcttgaagtctcttatagtttgatggagcaacaaaagaaaggaggtgatggagctggagaagcgcaactctgaacttatatattaagatgaaatttttatgcaaaagagttagtacttaacttcataataagggattaaatagaaaaatgtttttaaacccatcttaacccgaaatcatatttgtatgaaaagtatttagtagacaaaaacttaccttgtcagaagtaacatatacctctgcgttccattttccccttggtcaattctttcttcagaaagaaacacgtctttcttcgtttggacattcttatttacaagcgaaaatgacgtatggacagtctcacaaacaccaatgacggccattgattgaggagagtaaaagaattgcatatcatacttgcgtgaaacttgaatgtcaatcgatcagaagctaagctgtttatgacaattataaaaattctaatcttaccactccctagtcttattttattttagaggttttagaattaaaatttgagcaatactattcacgaatcagtacgataagtacttaagagaaactaaagtgactatatttactcatacaaaatacatgaataaaactttaatgcttaacactattttttaaaataaatattacttaaaaatttacaaaattgttaaacaggtttgaatagaaatcagctttggtacatatttgacaaaaactattcctactaaatatcatttttcttaagatttttacactctcaatcaacatcctctaaaatatatagtgaaatttaaattaatttattaagtatatacatatatatatatatataataaagtacacattaaaaaattattactttaatgtttactttattatttatatatgagatataagaattaaattttgtaataattacactatttaatagtgttatttatatatatggtttcatttaaaaaatttatacttgatgtatattagcattatatttattaaattcaattcaataccatatattatatttagtaaatataataattaatactccctatgtcccattaaaattatcgtcctaaatttttttacacacaaaaaaattaataaatatatgtatgagatataagattaatttttgtaataattacactatttaataatgttatttatatatatagtttcatttaaaaatttatacttgatatatattagcattatatttattaaattcaattcaataccatatattgtatttagtaaatataataattaatactctctatgtcccattaaaattaccgtcctaaatttttttatacacaaaaaaaactaataaatatatgagagagttacaattttactatattaacatgctattaatcttctttgttggaaatgatgcaagtcaatgatagttattagaggtataaatgaaaagaataattaatactgttatggttatcgtgttcagattacgtagacgttatagtttgggtctgggcccaattgttatgaataatcatgcaaataacttacccatagaatgtggaggctgacttggtccatactgaactttgagaacgtgctggatgaggccgggaatccaggaagcagttctaatgcccgttacgaggtattttgtttataaatacacagtaattcctggtgaaaggtacacacacacattctatctctctctttcaattacacagagcacacaccccacgtcaattggtgtatctctgtgatctcctgccccaaggtatcaccttccattgatatccttgaagctgcagagttagagtgatcaaacagcaactccatagcacttcggtgttatacatttgtgttctggaaagaaccagaacattggcgccgtctgtggggaacgataaacttcgagtcccacgcttgtcaataatggtaaacacaagaaacagccactccgtaccacattcagagatgccgaacagagagatttgcctaccggagaatcagaatgtggcacggagggaagaaatacatgtgacggaagccgtttccgacgaagcttcctctcccgctcagacagaccaacggaggaccccaccggtgcgaaggatgggccaggaaggggagctcgaaggacagcttgtcagcaatgttctcaattcaatcctaacccgaattgagaacatggagaaaagacaaaatctacagagacaggaagacatccgtggcattacacgccaaatagaagaacgtaatgaggagtggagacgtgccgaaatgcaacgaacgacacaattggagcagcagctgcggatgatagcagaccgggtacaactttcaaatcctgagagggagacgcaggatttgaggacccacttgaaccaaagaagaagtaccgacccggaagaccaaaggtggatagaggagccgcaagatctaaggacacacctaaatcaaagaagagataccgaccccggagatcaaaggaggatagacgagccacatcggggtcaaaaccgggcacagaaggaggcacgcgatggagtcgacacaaaccagagccgcgacgaaaatccgaacattcgagcaaaacatgacgacaatcccactggtagggcaaacaacgagaggaacctgacgggagaacaaaattttcgcgagaaggcaggaccagtgtatcgtcggaaatatagcaggggacagcaaaacaacagtccattcgtggacgacatcgtaaatgctcgatatttggatgactttgatgggtcattcctatcaaagtatgacggaacacaagacccacaagtgcatatcgacgaattcgatctgcagatgtgtgtccggggcattgaggagcccataatatcaaggattttcattacaacattgacgggcccggcgcagatgtggttccatactctgccgcctagatcaataaagaatttcgaagactttggtcagaaatttttattgaacttcgcgactagtaaaaagcagccgaagtccgagttcaccctgggcaaaatcagacaggcacccggggaaacactgcagagttatttggatagattcaaagaagccgccctgcaggttgatgggctagaagaaagagtccacgtatacttgatatcggccggacttaatggttcgtcaagatttgccaagtccatttacaaagacccggtgaaatctttgatggaatttcgtgcacgcgcaaagaaatacttggagttggaacagatggaggtcgtcaacaactcgggacgaggaaaggagcgtcatgaaaggagaagcccacccccaaaaaataggggatacccggagagtcgagctcggaataatgatccaaaatcccgaccaggaagatacgaaaacaaatatgagaaatacactccattgaacgtatcccgttcacaaatctggaaggaggtcgcactcacagagatgaagaaggttgaacgaccccgcccagttttcaacaagggtggattggataaatcacgattttgtgaattccacaacggacctgggcacaccacagaccaatgttgggatctgcgggatgcaattgagaagttcatccgagaagaaagaacaaatggaaaggagacgaaaatcaacatatcaacgaaggaaagagacctcgggaagataatgacgagttcccggaacccgagtttgaatgtaacgtgatttccgggggaatgggcggtggcggggatactgccactcaaaggaaaaaatatctgaaggaagtgctatcggtccaggcacaacctaaattcaaagctcggacaggagagccagaacctccactcttgtatttcacaaagcaagacatggagggggtagtacccagacatgaagacggactggtgatctcagcgacggtgggcaattgccaggtaagaaggatgtatgtagacaatggaagttccgccgacataattctattgaacgcatttcggaagatgaagttggacgttaaggaattaagaccgtgcaaaacgatgttgatcggcttcaacggcggaaacacgaatgtaatggggtctatccgcttgcggttaaccttgggaacgagagaagcttacaagtctgaggaagtggaattcgtcgtggcagattttccatcccaatataatatgatattgggaagaccaaccatacataagtgggacatcttaatgtccacaaagcaccaaaaactcaagtttgtgggcagcaacaggcaggtggtaaccatatgtggcgatcaaaaagaatctcgacaatgttattatgatacggttcgaaaaagtgaacgagaagctaacgacgacattcataattgtgtacgttcagtaaatgtggtggaattggatatgcgagaagccacggatgagtggaggccggaaccagtggagaaagttgagcagattctgattggagaccaggttggtcaggtgactaatattggtggaacattagaacccgaacagagggaggaattgatccaatgtttaaagaaaaatcgtgatgtatttgcatggaaggcgtcagaaataccaggcgtcgatcccgaattctgcagccacagactggcaatgtacccggggtcgaaaccggtggaacagaagaaacgaaaattgggaccagagagagcctaagctttgcaggaccacattaatgagttgctgcaggccggcttcatacgcgaagtacaatacaccacttggctgtcgaatgtcgtaatggttcgcaagccgaatgggaaatggagagtgtgcacggattacacggatttgaacaaaatgtgccccaaggatgcataccttatgccaaacatagaccagctggtagacaattcatccgggtacagaattttgtcgttcatggatgcattttccgggtacaatcagatacccaatgcacccggacgatcaggagaaaacgacgttcataggtgacaaagccaactattgctataacgtcatgccatttgggctcaagaatgcgggggccacataccaaaggatgatgaatagagtattcgagtcacagctcggacgaaatattgaggtctatatagatgacatgatagtcaaaactgcaaaggtggataagcatgtcgaagatcttgaagaaacctttggccgactacgcaagtttaacatccggctcaacccattaaaatgtacctttggggtcggggccggaaagttcttgggtttcatgttaacacacagaggaatagaagctaatccggataagtgtcgcgctgtcctggatatgcaattcccgaccagcaagaaagaagttcaacaactaacgggtagaatagccgccctcacgcgctttatgccaaagtcagcagagaaggcattgccgttcttcaagatgttgaagaaacaagctgtcatagaatggaactcggaatgtgagaccgcctttactgacatgaagaaatctctggcgtcgcccccagtattgtcaaggccggaagcaggagaaattttagtcatgtacttatcagtaggtgaagaagccgtaagtgcagtactaataagagaggtggagtccacacagaagtcggtatactttgtaagccgagcattgcgcgactccgagtcgcggtatcaaaagttggaaaagctggtcttcgccctgattgtcgccgccaaaaaattgcgtccatattttcagagccataccatagtcatacggacagaccagccaattcgacaaatcttacataagccagatttggcaggaagattgaccaattgggcagtccagttgtcggaaatttgatttgaaattcgaggctcgccacgcgattaaatctcaagcattggcagatttcatccgagaactcaccccccacgcctcgacaattggagaatggtggaccctatacgtggacggatcctccaacaggaaagggagcggagccggaattataattgagaatccggaaggagtggcaacgaaaatttcactgcaattaggttttccaacgtcaaataaccaagccgaatacaaggcattgatcgtcgggcttgtacaggcaaaggagcaggaagctaagaacgtgaaagtctacacagactcgcagttagtcgcatctcaaattgaaggccgatatcaagtgaaagggcccttgctggcaaaatacttgagccgaataaaagaattgatgtccgaattcggcgaggttgtggttaatcacatccctagagaagaaaatgcccgggccgatattttgtcaaaactggcaagcactaaaaaacctaggaacaatcgaaccgtaattcagcaacagacgttacagccgtcgtgcataatgatgatcaccaccgacaatgattggcggcgtccaatagtaagttatttggagaaggggtgatgtgttgcaaacacatcttagttttaggatagttttaggttatgttttgattaaataattaggatttagattaattttagctagtttattaatattatttcattttatctaatgtcaataccaattatgcatttcagggcttaaaagaggagaataaaggcaagcaaaagaagaaaacaaaatctggagttccacgccactcgcgcggtgttccacgctagtcgcgccagtacctcaaggattaagggtattctcttctgccaagccgcgcgacaagcgccatgtcccacgcgacaagcgccattctttcggtcattccacgcgactagcgcgagatcgcgcgcgggtcgcgtgaggttgaaattgtttccttatttaaattatatattttcagatttggtactatattaggattagttgccttaattaaaggattctataaatatatttagtttccttaattaagaagatttgattcagatttggaacaagaaaataggccttgttaccctaattagatttatctataaataaaggcctctaggaagcatccaaatcacaatctctctaccatctatcaaccccttccatcactctctctttctcatattttcaccattggaagtcaagaatcaaggcaaggtcaccaagaatgtattatttgacagcctttggtttcttgaagcctatggcaggctgaacttgtattgtgggaaggccatgaactgatgtaactcctctgtaacttgaattggtattgattctaatgctgttttgattattttattctactctgtgttattcaatgttttattcttatttggaattggctattctatttaagtattgagggttaggattcgcaatggacacgttggggttctaatttctgacctgtttagaataatagttgttcttcgcttagacatagggatgcatggctacggattttataatatgttctttttcatgcttaacttaatagaattcaccaaggaattgggtttttgaattgggttaaagggttaattcactaaggaattagggattaactaacttaggaaaggcttattctccgaataatcttaacaagatcacatgagatatattctttgaatacttagtttgacagattcactaagggtttaggtttctcgatcgaattaaagggttaaatcgctggttatgactctagtagttctaggatttacgaatttaggaaagatttatcatgtgtgtgacttacaataataaaccaatcaagtgaaggaggtaggaacaaaggggattgtacctgaccacaattgtttcttccattggtaacttcttttatatttttactgcatttattttctatttctattcaaacaacaaatcaattcaacaattatctcttattttctgttttattttccaatcatttagaattaatattattgtaaaaattaccccaatccctgtggagacgataactcacttacctactttattacttgttaacgatcggtgcacttgccgtaagtacacaacaagtttttggcgccgttgccggggattggttaacggatttttacagtaattttttaattttagtgattggaatttttgttattaattgcttctccaagttttatgcgaggtttagtcaattctaaggacttgcagttcgatcccgaaatagaaagaaccatccgaagaagactagccatacaaagaagaagaagagaagctgagaattttgactttgattcaattcccgaattagagttggaatcagaaatagagatggctgaagaagaaagaaatcatcggcccccaccaaggccaagacctgaggatgaacttatggaggatattctggctcctatgttcacaaggcctaactccagtattgtgaggccaccaattcaagctaatcattttgacattaatccttctttgatagtattggtggaacgcagtcaatttggaggaaaagattcggaagacccacatgactttatagacagatttcttagaatctgtaataccattagacatcaaggagtctccgacgatgcggtaagattgagtttatttccctttgatgtcaagggaaatgcattgagatggctaaactgtcaaacaccaaatagcatctcaacatgggaagatctggttacaaggttcttcgctgaatatttttccatggaaaaatacaaccgcttggtgaatgaaatcaccaacttcacacaaaacgaaagagagtccttatgcgctgcatggaatagatttcaagagttgataaggagatgtccacagtatgatatgcctgtaggtaagcaggtaaggatattctttaatggtataactcctaaaactcgaatgattgttaatgttgcagcgggaggcacaattagatcaaagacagcagctcaaacttatgagctaattaaatctttggcttgcactgaaaacgtaagcagcaccattccgccaaagagagaaccaatacaattggacagcagtgatgccatgcttgcagaacagaaaattttagcccaacaattggctaaattaaatgaaaagatagatagaatgcaagtctctgcagcccaagtttcagccagtaaaccacaagtcagttgtgaatactgccaaggtgagcattattctaatgtttgtcctattcttgttggagctgaccctgtgcaggttaatggcatttggaatgaccaaagacagcagcagccacaacagaagaactacaattatactgctggaaacaattatcaaaggaactttcaaggaggaggactggactacaagtccaataattatttgcaacctcctcccattcccaacactagcatttatgaactttgagaagatagtaatgcagctgtcacaaacaacatctgacttcatccaagagactagagcccaccacagaaatcaagatgcctccatcaagaatcttgaaatacaaattggtcaattggcaaagcaaatttcagaaaggccacaaggacaattcccaagtgccacagagacaaacccaagggaacaggtcaatgttgtcacaactagaagtggaaaagtgctaaatgaaccaacaaagcatgaggcaagcaacaaggaagctgaaaaatctgcagcagctgatacaaatgaagaaaaagctacagaaaattttgaggagccaaattctgcacatcaacaaaagcaatgggatttctctcgctttgagaaacccccatatccggtgctaaccaaacagcaaattcaacaacagcagtttgccaggttcttagacatgtttaaaaagttgcatgtaaatattccatttgctgaggcattggctaagatgcctcattatgcaaaattcatgaaagaaattatgtctaagaaagagaagctagtaaaaggaggaaccataccactcactgaggagtgtagtgccattatcttaaggaagcttcccaagaaattaaaagaccctggaagttttaatattcctgtatcaataggaaatataaatataggaagggcactttgtgacttaggggctagtataaatttaatgccattatctatgtgtaagtccttaggcataactgaattaaaatccaccggagtttccttgcaattagcagatagatcattaaggaaaccatcaggaataattgaagatgtgttagtgaaagtggataaattcatcttccctgcagattttgtggttttagatatggagggtgaaagtgagatccctctacttttaggaagatcatttttagcaactactagggctttgattgatgtagaacaaggtaaattagaattgagattggatgatgaatatgtgatttttaatgtttttaattctaagactaatccatctaaaagttataactgttctatgataaatgtgctggatgacatgagttgtgcaggtgtagtaacatccttagatgcagaaaatactgcagctgaagcaaatggtgcagcagaaattgctgaagaaaattggacagcagcagctatatcatcaacctcagagcttgcagtaaataacactgcagtaagtgcagcaaggacagcaatggaaacactaggaattgctgtagaatgcaacactacatataaagaaaaaccagcagaacatatgcaaattaaaaagcaagataatcatccaattggagcacaaaaaggtaagctagaaataagttcaaccaaagctggaacattgcaatctgcaattaaggtctttggctgcaattgagaaagctacaaccaagaaaaagaagactagaaagaagcaacttgagccgggacaaaaggtaatgctagcaacatatcgcatgatatttccaggtaagaaatcattttgttggtctggtcccttcatcattcaaaagatttgctcatttggattcatagaaatcatgcctgtagacagaggtaaaccttttaaagttgctaaatgccggctgaaacctcacattgaaaaccaagtggataatgttaaaactcctaatccacttaattccactaatgattaaaaagcatgatgcgtctagctaagacgttaaacaagctttggtaatgtacataactattgattaagttttgaagttgttagcctagtctttattattatacatatgcatctatctatataatcattatatttaattaagtatttccattaatattagatttttaatttgttttagaagtaaataaattaattttcatttttatgctttagaataagttaaattagatagcagtaggtccataaaatccaaaaatcaaaatataggacttagtgaaaaaactgtgcagggcatctggcgcgacccgcgccgcccaccgcgctacccgcgccaaagatactgtccacccacgctattagcgtgaaatccgcgccggtcgcgcggtaaggcagaaccaaaaaggacttgcactggaatctggcgcgacccgcgcgagatcgcagacttagttttatttttaaaggctccagtttgtacctcatttcttcctactcccaatttcattctcagacttaccctcaccccaaatcttaagacccaaagcttgaactccataagggttagaaataaggtaagaattctgaaccttatatgttttgaaactcaataatgggatgattatgcactgcactatatcaaactctcatcttctcattcaattctaatgaaatttctggaaaaaccttagggtagagaaccaaatatgaatagtactaatgaatgatgatcaattggttgtgtgttggctgttttcttttgataaaattttgggttttgacatactccaaatgcacacactatgttgatttgttttaatgcataccacctgtttgctaaaatgcctatatgaaaaattagcttgtaataagatcaaggttagtttgatatgcataaagcttcaattaattaaaattgcatgatgggaatggctagggtaagcatgaattgagtgatgatgaaatactattaaggcatgcattgataatgttttgaaccaaataccttgaacatatcaaaagctcaaatctgggaatgggagattcatcttttataggtgcttaagttgttgaatcaaatggagtatgcttgcatgaaataagtaaattctgaaaattttgatacatgcaaggacttaaatctgggaattgttgctaggcatattcatggtatatgtgaattctcgtgtggttcctagttctaattataatatgtttgcatttaaatatgggaatccacatttgtaagctttgctatatgctaaattgttctatgatatttgtagcttggcttatgtgtttgatgttaaaatttcaggtgtctgagacctgtttggggttgttataaactgattattaccattacaaatcgtaaccccaataataaacagctgattatgtgaaactatggaatgaaataaatctgggaattgtgagcactgcgaaattctgagcagtttaaattcccaaccacttacatacataattgttgtttttaacaactgtgctagtatttgtttgattattattcactaatgcacagtttcatgatttggtggttattttgagctacaaataatggaataaatctgggaattcacccactgcaccaggtataaattggaatttttctgcactgtaggatgaagagagtaaggaattattgttacatactgcagcaaaaggacaacactggaacctcttatttgttttaactgttttaattttaattttcagtatgcttttagtttaactgttttgttagttagcggttttaaataagttatgtttggactaatactcagtgctagttgagtttatcaaataatgcatacatgatttgaatgttttaatcctcttcacttgttgctgaggacaacaattttctaaatctggaaatggtcgtatatgcattatttgttaaatcacaaaggatgcccaacagaaaatttgtgttttaattgttttagtcattattttaaattcttagttaattatttcaataaaagttgcagcacattaaaaattttcagactaaaaagtgaatgaacacagtaatggataggaattctctgataaaagcttgtgtgaaatgaaatatagcatgaattgcatgatacatgattggattttgattgttggtatatgatatgcatgttgaagttgaaatgttgcttgaaatgaagtcaatagtgattgacttgagtgaaatacctgtgagacttttgagccaaacggtaattatttttcttcttgagagactccattttcttagtactctagaacttgaattgtttctctggatgcaggtataaattgacatgattaaggcactttcttcttcttaaaaccagggccaaattgacttaccttcaattattattccatttgcacctaattttgagctttagcctttcaattctgttacctaaatcagagctatgtccattaaccaacctccctgaggctagagaaggtaatttaagttcatgacagcagagaacagggaagtgttcatcaaggcatcaaggaaaacaaagtgaattcaattggtatgaaggaaaaagaagaaataagcagcaggccagttgagaaatattatgcctaaaactataagctgaaaagtttgaaagttgctgtatagtgaaaagaaaagaaaaatcaaaaagaaagttattgtttgttttgttttatttattataaggaataaatgttgaataaagtaccagattgtgaagaagatgaacaaggaaaatggaagactacaggattggacttaaaggactggatctagcctcatattagctactatccaaagattttcctaccgttagcccagccaagttacaagcctcaaagaccttctgatctaattatgcttgcatctgttgagaatattttcaagcctatggtagtgctttgattatgtttgagtgagagattgattaacctaatacacttgagtgcatgagtgcatacacacatttctgtgaggaatactcaagtcatctcattcattgatgaatttgaaagtaccatagaagctttaatataacttgattatactcagcatgataattctaggattgtaaattatggttcaggtttgattgttgatccttgtttttatcttagagttttgtctgttgctgaggacagcaactaataaatctgggaattatttgattgttgcaaacacatcttagttttaggatagttttaggttatgttttgattaaataattaggatttagattaattttagctagtttattaatattatttcattttatctaatgttaataccaattatgcatttcagggcttaaaagaggagaataaaggcaagcaaaagaagaaaacaaaatctggagttccacgccactcgcgcggtgttccacgctagtcgcgccagtacctcaaggattaagggtattctcttctgccaagccgcgcgacaagcgccatgtcccacgcgacaagtgccattctttcggtcattccacgcgactagcgcgagatcgcgcgcgggtcgcgtgaggttgaaattgtttccttatttaaattatatattttcagatttggtactatattaggattagttgccttaattaaaggattctataaatatatttagtttccttaattaagaagatttgattcagatttggaataagaaaataggccttgttaccctaattagatttatctataaataaaggcctctaggaagcatccaaatcacaatctctctaccatctatcaaccccttccatcactctctctttctcatattttcaccattggaagtcaagaatcaaggcaaggtcaccaagaatgtattatttgacagcctttggtttcttgaagcctatggcaggctgaacttgtattgtgggaaggccatgaactgatgtaactcctctgtaacttgaattggtattgattctaatgctgttttgattattttattctactctgtgctattcaatgttttattcttatttggaattggctattctatttaagtattgagggttaggattcgcaatggacacgttggggttctaatttctgacctgtttagaataatagttgttcttcgcctagacatagggatgcatggctacggattttataatatgttctttttcatgcttaacttaatagaattcaccaaggaattgggtttttgaattgggttaaagggttaattcactaaggaattagggattaactaacttaggaaaggcttattctccgaataatcttaacaagatcacatgagatatattctttgaatacttagtttgacagattcactaagggtttaggtttctcgatcgaattaaagggttaaatcgctggttatgactctagtagttctaggatttacgaatttaggaaagatttatcatgtgtgtgacttacgataataaaccaatcaagtgaaagaggtaggaacaaaggggattgtgcctgaccacaattgtttcttccattggtaacttcttttatatttttactgcatttattttctatttctattcaaacaacaaatcaattcaacaattatctcttattttctgttttattttccaaacatttagaattaatattattgtaaaaattaccccaatccctgtggagacgataactcacttacctactttattacttgttaacgatcggtgcacttgccgtaagtacacaacaaggggacattaccagacgacgagctagaagctcggcgtttgatacgaacatcgaccatgttcacgatcatcgacggggagctgtacagaaaaggactgcacaaccctttgttggtatgtgtggccccggatcgagtaggatatatcctgtctgaaatacatgaaggtattaacgggcaacacatggggggaagagcactgacaaggaaagcacttcgagctggatattactggccgacgatgggtacggatgctgccaagcatgtgaggtcatgtgaaaattgtcagatgcacgcttcaagggtattatccccgccggaagaattgcaatccatttcggctccatggccgttttataaatggggtatggaccttttgggtccattcaagccggcggaaggacagatgaagtggctgatagtcgccatagattattataccaaatggattgaggcagcccccttggctacaatcacttcggcccgagtgcaaaattttttcgagaggaatataatctctcgatttggaatccccggagaagtagttactgacaacggcactcagttcacggacaaacaatttcaagagatgatggctagtttccagatatgacaccgttttgcgtcagtagaacaccctcaatccaacggtcaagcggaggccgcaaacaaggcaatcctaaaggctttacggaagcgaatgtacgacgtcgggtcgacctggacggaacagctatattatgtcttatgggggatccgaacctctgtccagtcgtcaaccggggaaactccattccggatgacttatggaaatgaagctatgatcccagtcgaagtcggacaacagtcatggcgacggagtcaaatgctacgagacggagaggaagcaaacaacgaagttttggcattggagtcggaacttattgaagaggtccggataacggcccatgcccgggaattaaaaatgaaacaacagatggcgcacgcttacaataagaaggtggtcccgcgacagtttgaagagaccgatttggtactccgacgtgctgacatcggaaataaaaacgctcgggacggaaagttagcagccaactgggagggcccataccgggtcattaaaaaattaggcaaaggggcatatatgttggaaacgctacaaggcaaaccagtcaagcgaacatggaatgccgacaaattgaagaaatactacagttaaagtctcgaccttccttttaataggggtatggattcggaaaatgttgcatccgagtccgtatggtccctgttcatcgaaggtacatgaggcagtagaagaaggcaacctcgttattaagggtatgggtccggaatacacatatccgagcccatatggtcctctttcacgatgaagacgttgttaataaatgcgaactcggaagcctaccttctgagcatgtcatcgtatcaaataaattatatcgttgtaatttctaagtgttagtctgatcatattcggacacacatattgttattgtaacaacgaatataaatgcaagtactatgaattaccacgatattgaatcattttatgcggttttgtagtacgatgactatgaatgatacgctaaacggccccgatcagaccggataatggaagcctcctttagcgtagttgttcacggtcagacaaacgacaagcaataaataaaataaataaatggtcgttggaaccaaaagatgcgcgcacaagatattttatgaatcaagtaaaaagcttgaataatcactaaataaatatttgttccgggcaccaggcccaacaaagaaaagaaatacaaagataaaacaataatgtctgcctccctaatcctttgaaggaacggaatcgggagtcggctgagatggatcgggaatggatgtggggtcggcaacagaagtgacgacaggagcaacggaggttggttcttcggttgtcaaaggttccgacgccactaccgaaggatcttcagctgcaggaggaggaaacagttgaccgtcctcgacataagccaagaaatgcatcccggcagtagtcatccctacccgggggttcaagaaagtaatctgctcaagggcgttattgaagccatcctcggcagcatcacgaagggttgctttcatagcagctagccgaccttcgtaatcctggacgcaggcttctttgtcggccttggcagaatcaagggaagaagtcaggagggccaccttctggtcggcagcttcaagggagccttgacaccgcgccaaatctacccgcagggaggcagaaacggcttgggacttaagtaattcctcccgcaaaagcttaagctccgccgccgactgcgtttggagggtagcaagttgagccttaaaggaaacaagttcctcacaggctttgtccttctcctccaaagctttgtccttttccgccaccgcaaacccgtacctgcgacattaacacttagaaatatatacaaagtataagtagagttaaaaatgtcacaaggaagatgcatacttctcccgaacagtggtaagtgctcgaacaagagaagcacagcgaacgacattctcctcgatccggaccagctcggccagttcttcatccaccggggcacccggcttgagcatatatgaagggggtttggtcaaacgaaccaactcttcagtaaccccttttttccatacattatccgacgaacccgcacctcaaggtgctcggagccagcagcgggggtagtacgtgggcggccatccgccacggtaagatccacagtttcgaccatcgaaaccggggtcaaggttgccgaggaggaaggcagtggagcagccggagtagctgacgccgccttttgagcaccttcgtcaaaaaacgccctgtaaggaggcgcaccacgttttttggacggagcgctaagtttgtcagtcgccggcctcttgcctttgcccttcacttcagttggtttggaaatatgggtgacgtcggccttggctttaggaggaggtcgggatcccattccggttacaatcagaaaacatcataattaatacaaatgcagtgataaaccatgagataatgtagtcaccaaagcagaccatttcgacgaccaacgccaatgtagtcagaagttttaggctgaccatgagcgcttataaactcagaaatcacgaagacagaagaggcatccgagtcggaaagatcctcttcgataaatcgatagttggaatgatcctgcttgtaatgatcatctgaccagtacaagggaaaaacccattctacatcggacgactcaggaccggacaagaaaaagggtcgccgatgaggttcggtggcaactttgaagtatttgtccttgaagccacggaaggagtccgaaaagggatcgaagagtttccgtttactctgactacgaaaggaaatccacccttttcggtcagaaggttctttgcctgttctaggggtatgtggagagaaataataaaagaagagaggaacggtgcaggggatccctaaatccgtacaaaataattcaaaagtacgaataaacccccagctatttggatggagctgggaaggagctacccgtagatgatttaaaacttcgatttcaaaagaggaaaaaggaaaggtaatacctatttgtgttatgacatcttgaaaaaagaagaagaagttggggttattaccctcccgttgagcgcaaatgggctcaccgggcaggggagcttgaagggcgaacccatcttgcttccctactgaagtcgacactatactaggaaggtcgaggacagaagaagttcgaagaatttcataagtgacccaagggaacttagacgctaatgctgggggcacatctgaataggattctacagaggcagattcgtccacggtttccgaagtaacacccattatacctacgaaaatgaagaggggaaataaaagttagtaaacatacctggaggcaacgcatcaaattcacaagacactaaggccgaaaccccgtcgacgacagaatgagtatgcgatcctggttgcaaacccttgaaagcaggacgcaaaatagggttatgacgacatgaactaagaatcgaatcggcaatatcgtcggagcctatttgaacataatgaatggcctcggacacacaatccatacaggcatcataatcaacctccattgcttcaaccgaggatgaagatgattcctcatcataagatggagaaaggccaactggagggatagggtgatggcaagagaatcctagagagagacctcgtggactaccagtatcaattttgggcccaagaatcgaagagtccaaagaagataaagttctagaagaggctggacctaaggatgggcccaatgtccttggtttaaggtttacaagaatcggaggaggcgggggaaataaaggggctaaaccgccaaggtcggcggcagtcttttgttttccggaggaggaagaacctccagtatgacggcgaagggggtcactttcgttttcccccgccgaaagtggaaggccaaacaataaccaagcggccctagggccaaactttttccttatctctgcctcctcttcaggggtcattcttagggcaagttaaggaaaatcaaaggagaatcgaagaaaaggagaatgatatgattacaaaacgcgaaggaaaacccataaaccaagaaaaagtcagaaagaaactatgatgcaaccctaaaaatcctgatgctgacagagtcacggtaatgcaaaaacaccaaatgatacagaaagaaaggagaaagaaggtacctgcggtaatgaggaattaaaggatgattgggagaagaacgaagggggaacttgcagaaaatacgagaggatgcttgaaaggttaatggaagagaagagaggaagtaatatgaggaaataagcagaagtggcaagcacggaaaaaagtaggcacgattacggggttttgaaaataaaatttgaaatgtgatgataacttgcagtaaccaccaggcgcagggaaacggttcagtcaccacaatgaaacgacacataggggtatcatggtaaaagcacgtccaattatgagggcaagagagtaaagttacgacaatggtaatcattaccaggcaaatgaagtgacagatcctttaaagacatttattgccattaagggcaggaaaagtaactgattcgaatcaggaaggtcaatagccgtttcaaatatgttataaacaatctgggtacattactcgtccagggcaaatccgaccacaattattgggatgtggtcaaatgcagttacattcagcagaatccggatacgtgtatccataaaagtctagtcggagatgtttttctatccggacagtcatatgcctccaagagtggacagaacaaagcatagtcatgggaatacgtctccaaaacgatcgaagaattgtatccggatgaacgtagccggataagttactcggagtattgcggacggaggattatccgaatagtattctacccggaagaagccgactaattgtagtcggattaatggttaccctgaaggtagcaaatcacctgatgcatcccggctaccaagtatacttgataaccgggctggggggcaactgttatggttgtcgtgttcagattacgtagacgttatagtttgggcctgggtccaattgttatgaataatcgtgcaaataacttacccatagaacgtggaggctgacttggtccatactgaactttgagaacatgctggatgaggccgggaatccaggaagcagttctaatgcccgttacgaggtattctgtttataaatacacagtaattcctggtgaaaggtagacacacacattctatctctctctttcaattacacagagcacacaccccacgtcaattggtgtatctctgtgatctcctgtcccaagatatcaccttccattgatatccttgaagctgcagagttagagtgatcaaacagcaactccatagcacttcggtgttatacatttgtgttctggaaagaaccagaacaaatactatattaaaaattaaaatgataattattttggaaccgaaagaatattatttaagaaaactatagtttcatttataaatttatataataccattgaatgcttaaattaattaatgcaaaattgttccaatttagatggtactagtatttattatctctggttatatatataaaaaataaaagatattttcttggttctaattataaaaatatagatatattttattgctaaattttctttttactcctaatttgttaggtctattaatgatatgaacgaatctctttataaaagctatcacaaaataaaacatatttatttgttgaatttgaaaaataaccatctaatttataaaatttcatgattatttttatcataaaattaaaacttgataaaattaattaattaaattacttttatttatcttgacaaactacgtaattgtttcttatagtatttagcatcagagatagtactattcttttttatcaattttggtagtaggaaaaattgaatttgtaacttttttttcttcttgtcttctatttttctctctcttaattttgttaattttatgatactatttatatttgatgggaggaagatattagtagtactgataaagttataaacatataagtaatgtaaatcatagttaagaaaacgtggctgttgcgttgggaacatcatatagatttgtataaaactcattttccggattggcacagaaaaaagggtccggtgtccttgaccagacagacgaagaaactagaaaaatgtgagacgggccccttttcccttacgttgcatcagcatcttgttgttatgggagagcaactgatgtagtaggtaaagtccattgagagagaagagagtaaagtaacggccaaaataataaaaaaaaaaaacatcataatcttcagtttttttttttaacccgaaattatatacttaaatacaagattatcttaattgacagagcgatgcccattcttttctaacactgatccacacacgcagatagatataaaaattattctttccccatccaattacctttttcacaataatatcactgacacagtcaaactccaacaattacattcaacccgttacacttgcattacataggagcaatagctattttagctattgcctctcttctcttccaaacaaccaaaccaaagtactcttttttatcttccctcattaaaagctgcgtaacgttcactgatcccatcttcttccccgaaccttcaatccacatctaacaatacccatttccgcaaaaccaccaaagccaacttcttttctgttttggcccacaccccacatgacatagctaacccatttcaattggggttggttggcaccgtcctaaccttaaccaaagccaacaccttttctctttctccctctctctttctctctctggggtttcttttttggaatccctgaactgaatttgcgttgtgaagatggcggcggaaaaggttgttgagatggtggcattggagtctttaggaaaagggttcgatttggccagcgattttcggttgcggttcgcaaagggaattcgtggagagaggttggtggtgcttgatgaacagaacaagagggatattttgattcctggaactggaggtgttaccattgaaggggtttctgagaatattcgttgtgataaaggggatagaatacgcttcaagtctgatgtacttgaattcaaccaggtcccttttctcctcctccttctttatctgttactgtagatgagttaggaggatttcgtttttgaattaagatctgtttgtttgtgttgcatttttggtaaactctgcgtttttctccttgctgcagatgtctgagttgcttaatcagaaatcagcagtgcaagggaaagttccttctggctattttaatgcgctctttgatttgagtggggattggtttcgtgatgctgctgacaccaagtaccttgcttttgatgggtatttcatttcactctactatttgcacctcactgcttctccactcatactgcaagaggaggttaagaagtctgttccggctcagtgggatccggcttcgttgtctaggtaaacactaagctgatacaacaatctggtagatagacagattatggtatctttgttttcctcatgttaaaatagcttcttttagctttataacttcaatttgttggtgtaaaaatagtttcgtttcctggtagatagacagattataatgggattgaatttgatagattcaatttgttgctagctttttgtgcacttatggttatgaccatccctgcaaaatctagtatgtttggtagccatgaactggttgattaaaggatttaatatcttcttaccttcgcatgaagcttgaattaacttttattagttgatgttagtttgtgtgttcatgtttgaatgttttgtgggtgaactgtttgatgcagtaacttattttgacagtttgaatggtgcataattttgggttgataagtatatgatgctaatcaattttgttaggcaggttcatccagacatatggtacacacataatagtgggtatggctgtaggaggtcaagatgtaatctgtgtcaaacaaaaacattcttcaaagattcctcctggtgatctcagaagacatttagaggatcttggagattttttattctcagatgtcagaagcccttctttactacagaggaagacagtagatggaaaacagaaggtatagtgctatcttttgtaactttaaggtatttattatttttctgctgacgcaatggctctattcatgtaggtccctgaggtctttaaccgtgtgatgcaatcaaacacaatgcaattcactagtatttcagaaacatcaagcaaggatgtaagccctgaaagggaaataattttcatttgaaataaataatttttctaggttgtgaatatattgctttatcttggaacagggcctcactattatttgctcaaaaagaggaggagatatgttcaagcacagtcactcaaattggcttcagacagtgccgtctaaccctgaagcaatcctcttcaagtttgttcctatttcctcacttctgactggaattcctggaagtggatatcttagtcatgcaatcaatctgtatctacgctgtatgttctaatctgattaaacaatgatactataatctactacatttatcctaatccattttatgtctattactatttatatattttcaccatggtgtagataaactccgaaataaaaattagggaagaggaagagttcaagttacacccttcaactttatgtccacagtttattccttaaacataaacaagcaagatggtcaattggcttcccaatgtgtgcataatgctcctcttgatggatgcatccatccaaaatttaacaaagatgtcatatgcctgtcatgcaaccataaaatccagaccaaagatgtttcacatgtgttaggaaacctggggaatcttgtatgtcttttgaactttaaggcataagccgtatgtagtgtgaagttgaagggtgtccactgaattccactcccccccccaaaaaaaaaaaaaaaaaaacaaaaccaatatgttttgggcttttggctcttagattgttcttgtatgttttgcttttctttacatgaagtttccaagccatcgcttcttgcacagaccactgtttaatttctttactgttgaggtgcacaacactccattgatttacttactctctgcagataagccttctcccggagatttacaatactttctggagtttcaaattccaaggcaatgggcacccatgttttgtgagctgcctctcaggcatcagaatagaaagactgcttccccttccctgcaatttagtttcatgggtccaaagcttcatataatctctacacaggtactgttaaccaaactctttgtgtttgagcaagtattgtatgtgttagaccttactcttacatttgagtttaatattttccttgagaaagtttttgcttaattagtgtcaggattttcccgttactcacttctgttatgttacaaatttagctggggtaaaaaatttgttattctttaacctgcctaattctttaatcagttactttacctgttagtctgctacccttgagttttcttgtacaccttatttcatatgtattgtcagagaataggaaggagtctgaaataaatggcatcaagttaggattaggattcaggggttgaacaaggtgtgggatgttttcagaccgaaagataactcgttgtgagaaacactgttttattgtccccccccccccccccccccccaaaagagaaatttcattatagattatgaaagaaatactagagacgaggataagatatcctcctaaaagaaatcacaaaataataacaaatgaaaggaattaacaagaaaacccaaatacattgagcaaagaaaagatataatctctttatatgcaataaagaaacccttctaaaattgcacaataaagaaacccttctaaaattgcaccacaaaacaaaaatgaaataggtgacatctaaaagtatccttgaaaatactggcattcttccaatcatagacaccaaactcaaacaaaatctagtattactttaacttaataatcctatctgaatagctaattaggtcaagtactagtcctactagtattagcccaagcctacaagacttgcattcttccaatcatagacaccaaactcaaacaaaatctggtattactttaacttaataatcctatctgaatagctaattaggtaaggtactagtcctactagtattagcccaagcctacaaataataacactagaactatagaacctataggaacatatcaagaaagatattctaagataatctaaatatatcttacatattttcgaacaaattgtcgtgagaaatatgtaaggaaattcttgaaaacactacgaagttttaagcccctaggttatttttgcatgccaattgtgttggatttaactatctatagcattttgtctgcagttatgctatacttacaattttattggttttttttttggtagtaagctgtagtttagggtaaaagaaacattaaagaggatggacaattgtaaagtagttggaccaaaaaatttccctgttatgaactgagtcaactgactattctcaaagctcaagctactagggaaggcacatgaatagtttggttgctgtttgggggagaaaaggattataacctggttcacaaagttgtttagcaagataatgaggtctaagaagatgctacatttaaggaggaacagtattactatttataagaacaagcgagatattactaaatttttctaactaaagagcaattaagcttgtgagtcatactatgaaaccatacataagggtaattgaacaagggtcatagaaagaattctcccagctatagaggtattaagcttatgagcattattatgaaactgtagcaaagggtaattggacaaagattaagacgagatcattttttagtgtatgtttggttaagagataacatagttaactatgcattttctttatttggttaaaagaggaaatggagagaaaaaagagaaaaattgactttaagaaacaatttcaaaattttctcgcgttttgtttagtaaaggagaaaacacatgtaacaatgcttatagtggatcagcagcttcaggaccttgtgtaagcttctgctcacctctaataattttgggatgtgattcttttggacagaactcggaaatacactcaattcgaacaggtcataaaatgtgagcagtgagctcatgtgaccttatgcgagctcctggccacctatgagttatttatctgttttcttcattctatgtgctgcatagctttttagggattttcactgattttattttctcctctcaacgatcttgaattattgatcccttattcttaagttcacacaatattctcttgttaattatggtattttgtacaaaatgtcaggtggtaagtgaacaaaaacctgtggttggcatgcgcatgtacttggagggcaggaaatgtgacagacttgctttacatataaatcatctttcaagcctcccaaataaaatgatcctctcttcaggaacctcaacctcaagtacaccatcgatgtggcgaggatctgatgataatgaatccagtgatcaatttctggaacgaatcagatggaagagattctcaaatgtgtgcacagcagtggttaagcatgaccctaactggttgaataattctggaggtgtttatattgtaacaggtgcacaactccttagcaaagggagctggccaaggaatgtgcttcatctgcggcttctctttgctcatattcccaattgcagtatccggaagtcagagtggactgctgcaccagaggcttcaagaaaatcatcttttctcacaaatttgagcacaacattttcattcacacagcacggtaacactggtcctccaaaacagactccaactgcacttaactctggagtttatccagatggtccacctgtgccagttcgtgccggtaaactacttaaatatgtggagacagctgaggttgtgcgaggcccacatgatgctcctggccattggttggtaacagctgctaagctagtgactgatggtggtaagattggattacaagtgaagtttgcattgttagattattggtgatttcaggttaccgttcattctattcatggtatattggttgtcatgtgttgcttaaaatggtttcgaaaccattgatcacttgtatatattctttctacaggctgtgtacaggacagtatacaaaatgagtggctgttcacatcgggcaatagaaaattaaaatttgacaattctgttaattctggatacatttaaatgttgagtatttaaatcatcatcgtgaataagttatggggaaaatggaaaaaagaaaacacaaattaaaccatatatttgcaaatatataaatggggcgcttgcaaatcttttgtatcaagacactaggatgtgtgtagggaacatatttagtggcttagaaaaattaacgttgactgtataattatacatatatatggtcaagattatgttatactttttttaaatttaatatgggtgatgccaagtcctaggacaactggaaagttgtgtctaggtaattgataggtttgaattctaaaacggttgatgtacatatgcaagcattaaagttgcatataatgatactttctcatttctctaaatttcccatacttttgcatagtgaggagtgtaatactctagataaatcacacaagaatgagatctagatgatgtgtaggtataatattgtgcaattgaaaatgatttaaagatattaattgatattatctataaaaacaagatgtatttactttttgataatttatcacctaagaatgtcataactaagtgtacttgatttgaattagttatgatatgaatgatcttttaaaaaaaaatcaaaaagtgtctgagtaaggataaaactcgctaaaaagtcttgtgtttgtaatctatcttgagaccagttaagtgatgtcagagctggttgttgaggtctgaaaaatgattacttattgaagagtctgatgaacaaaaatgttaagtgaagtgtcaccgtgtgaaacgttatattatgagagtcgttgataagttgataataagagatgttaagtcttttgatattaagatactttaggtgacacttgatttgagtgaatataatttttttaatattttttgaaaataattttcattttcaaattttaaagatttagaaaacttgaagaaagtattttaaggtaccactgtgttttcactttttcaaaaaatgcgaaaaatgctaatttgttgtttcaattttggacttattttttaaaatattttcaaattttttttaacttttaaataaaggtattgccacttttgttttctattttctttgaaaatgaaaaaaaaaactatcaaaccaaacattatcttaattatttagttaactaaaatactaaattgaccttccattttaattatatggtcaatgttagttcttctcaggcactgatccttcatgtaatatgctaacataagagatgagagcagttaatattagatatccaaacatatatgaatagtgaagattattttcctaaatttgatcttggtcattcattttgattgtatgatatttggttgtatgatcaaaattagtttctttcgtgctctcatctcttaatacaatgcctatgtgtatagtctgtcaggcttatcacttacgatgaaagggagctaaacactatattacgtgacttgagcagtaaatttatatcggtgcttttacgtttagtcaattgggacaggtttgcatgcattggctgcgggttgcactagatcaaaagacacagataactgacttgtgtttaaaccataaaatattatcaaaccaactttctttgtgcacaggaatagtgtatctgtagggttaggagtttaggacagtttctgtatatctttaacttgacatttgccacctgaaaatcaatgcattggcaatcattttaaggaaaagaaagaggaggtaaaggatacagtggaaagatggaaaatggtgaccatatctattacatgctcttgctaatgtatagctttcttcatattgttatttttttcaagtaaaaaaaaaaaagtgaaaaatagtactaggagtaatataagtgatgctacctacacaattatatataattatacttgattttacatgcccctaattgattattataattaaatttggatagataattgtgtaatgttacggatcattgtgatattagtagataaaatcaatgaaaaaaaagttataaattgatactgtcattcaataataattttatcataaatgataaatttattaatttttatgataattattttaaaaattatattaacgatcaatgttttacctatctaaacgatcactaacctcaaaatgtattccaatctcctatatttcgtgtattgataagtagcaactgtaattcctgcaagggttgtttcctattgtgataattataatagtaaattatgcaactttacttggaaagaaaggaatctttgatgggatgtccactaattgcgttgggtctaaactttaatgaccaacaagactagtgtacagcaaatgagcagaaaaagttaacaacggaaacaccattggaggactcaattgacaacaaaatggtcaaaaccattgcttttattattttttaaataatttttcgctaaaaatggctacctgtaccataatgaccattgaccaaattgtgatctacaagagaggagcaagtggagacggaataaaaaataaagaggcgggctttcacactttgcaggatagaaaaaaatggcacatgtagaaggtaggacacattggtgtttgttaggacgagtttttaaacttgattttgaatggttttgattatgttaaaattagttttagttaaaattatgttttaaagtaaggtaatacatgtttgaaaatttaatctcaataagaagtctacattaatataaaattctctccgaaaagttgtacttttttttactcctaaccaaacatgttttaaagaacataatttaactacaactaaacataattttcaagtcaagtttggagagaatccaaacatgcctatataggcatgatgcatgcacggtttcacactaaacatttctgtaataggagtgctatgcgaagaggggtatcaacgcatcgtgtaacacttcaagtgctaactaaccttaacgtatgtctcgtttggtcagcgagaatatactcgagttacttgcacctgaattaaagtattttcactattttttttttttgtcttttgaccaaactcgggtgtgaccactggtaagtaatattaccatcttgcatattaatattataagtgtaaattttgatttccatctatcacctgagattaaaattttgaggataaattatatttttaatttttcaatttttaacatttatgattttaatccttaaatttttataatcaatcaaagtcttcaaactttatttacatccaatgattttgatgggacgtttaattttattatcaatttattatgtttttaatttttaaagatttttagtggctacaaattaattgattttggtataaaactaaagatgtaaatattgattgaacaacgtagccgtgaatcatcatgcctcttttacattccaatttgtgatccacattcaaacaaatcaattgcaaccacattatgcatacaaaggagtaaaaatcttatcaaactaaatttatgtcctcattttttctgggtttcattttccagatatgcttcacccctttgtgccctcctctaccccctcaacccagccgcaactcccaccaacaccacgcccacaaactagacggtgaatctctatcttcacaacatttgcttgtaaaccccttctcaccaatccctacatttgcaacactgttttccctttgaattgcgaaaaccacccacgaaatcttactccaaaaagatataatttttgcacttcttatagctacccaattcgcaatatgtcaaacccatcgaatccctggatctccttcgcttggtgtcgctgccaccataggcgcacctgttgcctcgtacaaccgctcgaagcttcagggaccctaacctctattattctttatgttttgggattctgttgtgcttaatttgggcactgaaataaaattgattaaaattggattcaacgtgttgttcagtgaaatgaaagaggaaaggttgcaaaaaagaaaaagaaaaattaagttagggtcgctggattgttcttctcggtgatggagaagaagataggttttgaaaaatatattcgaatttgggatattgtaatttttttcttcaaaattttgactaataatcaaaaaatttaaggaccaaaactataaacattcaaaaatttggaaactaaaaatataattttgtcaaattattattcaagaatttaagacaaatgtgctaagagtgaaaatcttggtgccggcaaaactgaaataaattgactttcgatgatcctttcagaataaccttctgcagtatgtttcatagaaagaaaatgaaaacagagagaaaaattcaattgaaagataaatgaaaggatatatatttttaaaatatttgttcttttcttttcaattaataaaagaaaataaattattactatatatttttcctaattttttcttctcatctaaatttattgttctttgcacctcacttataacttaaaattaagatattttatttggatgaaagaaaataatactacaagaaaaaagaatatgaattgaaaattgaatttttgagtttcaaaatttttctctcctttatattatcaattaaactcttaagaggcttagcttggttagctaaataatatatacgaggagaatttgttgtaaatattatgatatttaaggttaatttttttctgtaaataaatagataaacaaaaaaagctcttaactctcatcaggctgagaattgatatatgatataaattgtacacaacaaaagtgaaaagtgaaacaaactaacatcaactaccaagaatagagaatgaaaattgaaaagttgattgttcaatcctcgatcttgggttcagtacttttttttttagttgaagtcataatctgcagaaactttaacaatacgttttagtccaaagaaggaaaaagagaggggggattttaataaaggtaaggaaactgctttgtttggttcataacgagagacgaaaggaaaaatacgaataatatattgctttagctttatcattaaaaaaaatgatatcagagataaaataatatcacaggacaatttaatatgtactgtttaaaaattataaattccttttcttctcctttaaatctctaatgtaacagaggagacaaaataagggaggttttagtttcttcatttcttctttctttctctacaattttttttaaccaaatacaataaaattttctccttgatttcctaactagcaaacacaatgtaaacaatgctaacaaaatgcgtacaatatttgatttcagaatatagaggtcaatatttttttttttgagttagaaataacttacggctttagttctagaattagagttggtggagaataaaatactattaaaactattacttgacaccaaaacaactcaagtaacagatacacgatagtcgacaattttttttggtttacttaaattttaaaataaatgttttaaacaagagttatattgaaatcacacatataatttggacaaatcaaagattaacaaattactgaagaactcagaatatcaaatttaagcccaaaggcagcttcaaaatgtttataaatgataccttttacagtatattaaaattttggttcatggcctcaatcttcttaataaattattttaatggaaattttgcttttcccttcttttatatttttcggatttccaccgttagcaaacagcatgtggtcgtcatatgacaaaagcttctggaccatcaaagaattgatggaccttttggctatttgcttgagaaagcacaaacagtagttgaggatatttgttgatttctgttcctttatccacatggggtccatttccacccccatcccttcacacctcacacccttaacagataataacaattaactctttgaagcatcataggtggaatgagtgcgattttcacgagctagcgtttccttttatgtgaattatagttattagattggagaaaaggaaccatagaatagaaggagaggattaacaccatcatgtagcatgcatgtcaacaattgactatctagattaataaacaaaaagttggattgcaatctcccccagaaagatacatgacaaaggaagaaaatccaccaataaattagttaagattgaatcttagatgggtgtaggccaattcttctgaatttcaaagtggtaactagtatccaaatagcatttgcgatcatcatctacaaactgaaacaaaaaaaaaatagttagttcttcctactaaaaaatgcaacaatactaacattttatccgttccaaaataaatatcacgtttgactttttaacgtaatattaattatttttccattaatactcctaataagtatcagattagtttttcaatgtaatgttatattaagataagttttgtaaaattgttatgctcttttatttgtttattaatttttttggatctgtataaaataacctagaaaacaattattttagaacggagggtattacaaacagtgaataaatattgtatgatgtaaattaatattcttaccttggttcttgctgaataggttcccctagcaaacaaccccgaaggggtagtttcttcttccaattcatatgtatatggttcctggcttgggctataagttcccaacatcttttttgtgttgtctactatttcaataaattcatgaaagccacatgtaactaagacaattcaagatacggatgtttaactaatctaaaacataaaaggggttttatgtctcacctctaagcccagttttccaaacaacattggtgtatttgaggccagaaacaatgttgttggagacagtgaaggagaatttcaagcggtatcgacttccttccttaagggtgaagatactcttcttagattcagaagtaaatggaattggcagaatgaggtcaggcctccctggacatattatggtgaggctcactatcttcacttctggctccttgttttctgaagtacaatacaagggcttttgcctttaggttatttaggactcaaaaataataaggagctgaaatcaaacttaatgattcaaatatgcttaaaacaagaggtaggattaaaatcatcctagaccaacatttttcatcaaaatttgtcatctccaaaaaaaggtgattcaagtgagtgaaaaaaagggatatcttgtaaacgaaaaccaggagaatgctgctttatatgaacaaagaaattaaattggatgaagaggacaatcttcaagaagagttttcaatactgatgcactatttatgtcacgtcatctccacttaattaataatcattgatactttgatagagttgttccagaagaaaaacaaaatggaaggaaaacaagtacctccaacagcagacatatcaatacctcccagaagttgctccttccattttctcaaactctcatcatcctttgagaaacaaaagaaaaattgttaaattgttgaatccctttcatcatagaacagttggaaacataacaaacaaatacaaagaatggcagggcagtgaagaaacatttgaaaaaacgaatgttactttatctttctcaagctgttccttgagggaaaactgaggaccaagatccaattccaacttggggtcttcctctgcctctgaatcagttccttcagcatcatcattgtaaggaagctggtctgcttccccaacaaccttgttgcttcctttgtttttgatatcttcctccaaatgagcattgaagggaaaatccttggttgcagacacagcagcagacattgtcaacctcaaaatcacagacacagtggtgtctcaaactctattggtagcacttccaagtggtgccaaaataagacctcttggctattctttgaggataattctatatgcctcttgccaatgaaattgagccttacaagttacaattcagaggtttattatgtgtaagcaattactagtagttgaatttaagataagggaacagtgtgacacggtgaatgtgggcctgaaaacgaaggtaacgaaaaacggttggaataaagttggtagggaaccacaactaaaggtggagaaggtcaatacaacaaataaactcagatctccattatttttatacatcatctacattgtttagtacgacagttttaacttttaaatgttacaagtctttgaccagaaaaagaaagttataagtcaacaaatcaaaattactaattaataattagtgtccacaataagttcattcagttgatttaaattcacttgcgcgttgacaaaggtaaaaataaaaatttactacgattaatgcctcttttaacttgttaagaaagttgattaatttagttaataatattaaatttataaataatttgtattatttttcaaaattactcttataacatttattgtttattgactacaaaaattataaagtaattaaggatatttttgtcaaaaaataattaatgcaataaataatttaaaaggagtcttataaaaaaaataaacaatataaggacaacaatggtatatgaaactaaaaagaatttttatattgtcaaacgattataaattaacatattatatttgtattgatttttagaatagttatcataaaaatcagtaaatcataattttttattgattattagtacaaaaaaatttacaataaaaatacataaaaattaaattcacctatctctatatattttataaaatttcatttatggtaattcacgtgacacttattcaaaattttaaatttttaaatccttctaatttaacatttccttttttattaatattctgattttgcaattatgcctttgttgaattataatattttcaaccttttagttttttaatcttttgaaattaacttttggcttaaatatgatttaaattcctattagtaaattttgtttggagtctctaatatatttttttgacaattttataataaaataataattttattttaacccttctaatatatctatttataattgaattttattgacaatatcaaagacattatacaatgataaaaaaaaaaaaaaaaaacaacggctacatattacctgtctaaaggtacaaagtatgtaatattacgcagtacccaccaaacaagtatagtgatttcccctttttttatgacaatttttcatacatccttatcctagtatactagtatacatgtgctgaatcattccaattgcctcaagcagattgagcttgtagaaaatgtttcactagcaattttgaggaggaaatggtgcccatgacccaagaagaaacccacatgtgatgacagagaggtttaggacaaagagaggccaaaatatttgaccccaacaaatctttatgtagaaagcacatgggaaaatcaaacaaattgcaacacttagtagagaaacagtgaggctgaatacatgctcaaaactgaaagagcaagggatagtataaccaaagcaaaaatgaacccacactgcccctaattatcatttttgtcctgtcactgttaaacttgggaagccttttctccaactgaatagcgaaaggtgcaaattccagggcatatttggttataggcgtcaccacggttgcccacagagcaatctttgttacaaaaagctttggtggcatgctgagggttacctcagaattgacatccggcccaaacatattgccacccatgaaacccaaggtcgtgtaaagtaatgtaactaatgtgaagctccctatagatacctgaattcccaaattgaaaaattagaaaaataataattaataaaaacatctcattaatcttttcattttttaagcataatctcactcgttgattttttttctcatcctattcttaagcaattgatgaacaactatactgtctatgcatacatcatatgaatttaattttgttagtcaatcatagatggtaatataattgatttttttttttacttttgtactaattactttaaagggttaacaaaaaacaaatacttcaaagaatttaattttcttgcaataagaaattattattaacatgatttttttaaggtaattactataaatgttaaaaaatttaccatacattaaaaaaaaatcaatgaattttaataaacttttactttaaaagtcatataaaaaaagttatttttaaattagttaataatgtaaaaatattcatcaacattaaactcatataatatatattatttaccttggtaaactttgaggggtctttcatggctttatacaatgtgtcatcatagctgaagatgtaaaggccagaaattgaaggaatgttgtggaggtggaggaggggtatcttatgattaacttgaacacgtccaaaaattggagtggatgctactgacacaaaattgacaagggacatgagaatgccaccagttggaaaggaaagatatggaagagagatctctgagccacaaactaggcagagcaatcaacactgcaccaatgatcaggagctatgatttagatagttttgccaattgcagcttcagatgcatccctgagaagattgaattcaagttgtcatgcaatgagatggtgtaggaaacaagggccatgaagatctccatgtagatgaaagttgtagctatgaatcttcctttttgcaccaaatgcatgaccctcaatgtccacgtaacttcttaacttggtgttcttttctagtcatttcccaagtaaatgagaactatatgcacatatcacaccgagtcctataagcaaaaaagcagatgtccaccctccttgtctagagcatatggagttgataattgccccagacctgcaagatattataccatatgttaaataaataaatgtgtgtgtacgaatgcatgtgtgtatatatagggatcgaatagtatattggagtaaacatacaaaacttccaactaattatttacagtgtcagattatatgtgctaaagtatacttaaggtgtttttcctatatatgctgcgattcggttttgacttttcaatactgagcgattacaattaattatgatgtcactagatcctttattattcttaattttcaattagtgggtgattatagaagtttctgttagattaaagaaaaaaaaatgataatcttgccatgagcatcattgaaagaggtctctcgtgtatataagtagtctgtaggggaatctcatgttacttatcttcacctagtggttatatttgaaatttgaaataagacttatattatatgatgctcaaaggttgactgaaataaatgtaggctttatttgtgattctaaaaatataatatgatttcagtttcatacttccatgcaatttttcaatccttagcaaatgtaatggccaaatggagattgaacatgctaatttattcaataatatgatataattgaaagtaactagctaaaaagactaaaagggcacattcatatatgttcgttcaaatggtacgtaagcaacagtgcaaactttaccatcccgaccacattgatgacagcatgagtgaaagaacaattgacttcagagtcatgctgtgtatctaaattggtgcccccttctgcactctttgtatcctcaattttgttttggtcacacttccattgtttagtttcctccacgcaaaaaatgcaatttgccaggtttgcaccatgcactgactcagcgttatcaacttggttcttgtgctggagacatttctgttgaaggcttaggcttttccgcaaagatttcaacatgttggtcaacatatatactgatatcaagttcccatagtttaggaaaagcaatagcaactcaagcaaggttcactaagatgcttgctgagacttgctaaccaaatggcatgaaaggtgtgtatttatagttgaataaatattctgaaagggtcagcgagatggcttcaagtattggagagaatcttatattctttcacctttttaatttttgcaatgtaatgtttttttttttttttatatcgaaaaatgttagttgcaatgttagttttgttagtagaggtgatcgaatccataactctttttcacttcctttttccattaaccatccaacccagattttgatttgattctgaattggattatcaaattgctagatgcaaagttaattacattagttaaatgtaacaaaaaagagttgcattagttacaggaaaaaatatgatggccactgtgagagattcaaatcagtaatagcggtgatattcgattctaaaatttcaacataaaacactatccaagtttttggcccgaaacaacggtctgacattaaagtgcaatatatatatgaatgattttaatgttataccattttgcctattattaggtgttccacttgcaatatataacgtcataccattttgtggagttatttataccttagtaaacacgatacgatttgaatattaggttccacttggaatatatatggcgtcgtcactgtggctgaggaatgcttggcatgcacaaatttctactcactttattcgcaatgtcggatgttgttttttgttctatctttttgtggggggagtccctggagaagaaaattaatcaatgggagatacaccgcacaaacggcgcctaactgatcttaattataccattgcaagatacttaattgtgtgtttcttgctttgttgacccaactaattacactaaaaaaagaaaaagacgactgattgatatagctaaaatttaagcaggtgatagtatgatgttatttctgctcttgcaattagggatgacggagttgggtgtctcgttacgtggacgggtgttcgttatgcggctatgtgaattttttcaatactatttcggaatgtttaaaaaaaaattaaatatacttttatctctaataaatatatatatttttatttatttttaatgattttttattttgcgttgagtctctaataaaataatatttttattttttatttttgataatttttttaatctaggataaattaacaaattttgtattttctaatagaataatagattttgttttaatcccgactaatgacaaataataataaaaaattatcaagattaaaaataaaattcattaatttattataaactaaaaacaagtgataaaaaaaaataaaattattattttattagagactttacataaaataaaaaatcattaaaaacaaatataaaaatcgaatatttattagagattaaaaaatagttaagccttaaaaatattttattgtaagattctcttttgaaaacagtttcaaagttaaaactaaaactattcaaatagtatatacaattactctacacaattatactaatcaagatacttcattgtaaaaactaaatttaaatgttaaaacacatcagtattgcaagttcaagcaaaagtcaataaagtagaataattcagttcttattatttagagagagaaaattcaatccttaagtataaacttaagtataaacaaatgttaataaaatatccatataatttttatttttttaaaactagaaaatttaataaataattacaatatttttaacaaatttctatttattatcgtaaatataatataaccaacttatgattttttctattttcaacattaatcactccattatccagcacgcctaaaaaataataaaaaaagtatacgaccaatttagtccccatactttacacttgctcacaattttgtctctgtattatgaaaattatctatttagtccacgaatgtcaaaggccatgacaatttggctaaaccgttaaaatccttgtgtttctgctaacaaacatagcctacatgtctcacattcatccacatgacaagtacaatgcgtacaataactttctacctcattttggattaaattatcattttttcttaatgtattgattttcaaattaacaaacataatgaccacatataaatgaactctccttctaaaaaatttccaccaaaacatatatacttactaaaaaattaatctctaacaaatattattaactaacaaactagtccacaaaataactaataatatgcactcagtagtagaatcatccatgaaataatataacatgcacatagtccacaaagctaaaatgagcattcatagaacataaaattgttattcattacacataacatactcaagttcccaagtagtagtaaaatttctaccatgattgtacattaccaagaaaacaaaagacaccaaaacatgccacaatgtcactgacataatagaattttccaaaaatatatccaaaatatgtttaaacacatgtcaatgcaatgttccaaaatatgtctacaacattgtattcgcaagtgaacacctggtagaagtgcaatcgacattgggaaggatgtgcgtcgtgttcgtattctaggtcttaggtggtggggatgacatcgtgttttggtcgcgtggcaaacctctatactctcgcaagtggccatcagaggaagcgcaaccggtgcctagaatggtgtgcattgcgacaacaagaagagaggaatgagggatggtttggtgggtggagttgactttcagaaaagaaaacgtccaaaaaatgactttttgtgatgttttacactttttaattttcatgacaatttagtcccatatgttatatatttgctttatcatgtaggctataattgtaaacataaaagaatgattttaatgaactaaattatcgtgaccactgacatttatagactaaatatgtaatttcataaaaagaaggaaattataagcgaatataaactaaatgaactaaattgcatgtacccaaataaaagtaaatagtttcccgccattttgtgccccagggccaaataatttggcgcggattcagaacctgggagggaagcaactcgcacgctcactctagtctacagtcgattgggagtgttgcagagagaagaaagaaagcgatggagatcgttcgtcctcagagtcgcagaaacttgttgtcctcctccaacgaagccgtttctgctcccaccattctcctctatcgctctgctcccccacttgaagtcaggctcgaggatttcgagtccttcgccatcgatcgcctccgaggtctgttttcttcatctctatacttttactgttttccgcttcttccaattccagagatctgtttcaaatttcctctctgttcgtgcctagtgtttcgataatctgctctgcttttaactgtgtccgctgctccacacatatatcctagatttaagaaactagtgtcatgttgaagtgaaagcctgaaatctgcaagcgatttgtttttttattttattttaaatatattaaattagtatgaaatcgtgtgtgtttgcatgtgtttctttaacttccgttgacatcggacatttttcaagttttgtggtctgtttttcatggatattattgcttgttgcagttctcaaggggatttctgatggtatgtcgcggggaaaaaaagcggaagaaatggagaatttggtaaaaagctcgatttgacaatattaatttattagttcatgtcttgtggttgacaaaaaagaaataatgctgtgtggtggacttttccatgtgaatcaccccttgtacaggtaaaggacctgtggaaagtgaatatgagacatcaagacgcaactcaggttctgaacaaggatattatatctcattttgttctacgtctggtgtattgcagaacgtaagagctcttatcttctctctcttttgtgcattctcttttactgttgttccatgccattgaaaagaatcctcggttgtgtgactaataatgcctgatcaaaataaatggaagattactacaaattgaataaattggtaatgatgagagtttaagaccattggcaccaattacgtatattgatcatattttatggttgtgtaagtgtattaatcctgaatgatgctttacccagatcaaagaaaggaaaaagacaaattaataagaaaactgttgtaagaaatatttctaaattattccatatatactaaaattacataatatatgcctgtattcccagggaggacttgaggaaatggtttctttccatggaatctgcactctttcgctaccgttttcgtcttctgaatgctgaagctcaggtaaaatctggttactctatattgtttttgcatttgaagttaagtacttattcatcatatactttgtttatgagtgcacagagggcagtcatggaagaatttgaccttccttacagggctgttagcaatgtggaatttgaggtagtcacatcatttgttttattggtttgctctggactcttgaatctgaattttaccatgaagttgatttgtgcaaaactaattttgttctgagttacaaatacctcttagtacctaaagaaatgatgttttggattttcagagcataaaagagaaattgggacaagttgcacgttctatgggtcagccttcacctactggtaggagcacattgctttttctttttgcaatgattatttagcatattggtatgaatcagcagaaatgatttgcatgcaccatgctggaggttgttgaatgaataggaatataactagctgttgctacctaagagctaaggcgcatctttttttagattttgtttagtatgtaattgtaaatccactagtgagctagcagttgcatgggttaatttctgaagaaagatatctagggaagtttttcaagtggtatatttgcactactattatacaagaaaaaatctacagtttttgaaatttatgcctcattttttttcttcaagttttatttcctggtttttattacttttccaaatctaacgtgcctatgttttgcttggcttcatttacttttttttttgcagctgatgctatcttctacaaggtatgtgttcaatcttttttttcgtacttatttattgtcttgcaagagagatccatgcaccgggtgacatgcagttctactttaaatattaactcggtgactgttttaaatattgaattctaatgattcttccttgttcacaaaaaaggaaaagaaagcagttaactagttaaaaatatttgaatctataaaaaaaactgttaggaaatagtaattaattatcctttggtattttttatttcaaaagcttgtttttgtgtgagagagggagtgataaacaaagatgtcttctctcacgacctctagttgtgagagaagacatctctaacattctccctcagtttttgggttgcaacatttgtatattttttcttttatttccatataggtaccgtttgaagaagttccagagcttgttgctggacggaaagtgtttataaatcaaggatatgcatatgttgcaatgaatcaggttgactagtgtaattacttactaattattcttgcaatgaatcgcagagtattggttatagtaaatcttgtttgtgtttcaactttgcctccttcatagattgtttcacttgtagccacactattccgcagtcagctgtcaaaggcacttatccttacaaacaggttttattggtcatttggatctcaataaattttctcacatgcaaaattgatttctttctttaaatgcaatttgggatttaagatgcttagagattcatctaattgttgcagaaaatggacatcttcaattagagagcaagagaaacataggttgactcctgtacgtgtgggttttggtcttgtatatcaatatatcctttctttgttataaaagttgactagctttctatgtagattgtggaagctctgtcctcaagttatctgggtcctgattattctcaggtaattcaaatagtatattctttcatttttatttctgttattaggtatttatttgaggattgacaatgttcattttgattgaaaacctctgcagtcaagagaatatgctgatatatcattaaaggacatagatcaagttgccaagagctcatttcctttgtgcatgcgtcacctatttgataaggttagagattgggaaaaattatgctcatgtgtttcttcctgcttgattcatctgtaatatctttctttttacttatcttttatctttttcatattgagtccttatattgtatttcagttttgtctgacgtcttgatttataccactttttatgcagctgaaagaggataatcatttaaagcatggagggcggatgcaactaggcttctttttgaaggttgcgtttagcttccatctgggcatgataaaaatactctgtagagtctagatgcttataagtttgaggtgttaaatgaggcttgacacttcacatgtggtttatttacacatggtttggagaaaggaaaatgattgtctggaattatcgtgacattcaagttactttttttagtttcaagtattaacaagatataagtggagaaaattgaaatttgtgttttttatacccataaatttatgataccctgagtctgaaatttatgtcagccttcgacactttgactcatttcgtctgggtaaaatggcacaattaaagaacacgggtttatggttgtatgattatgctgggttagaaataagtcaaagtaatacattttggttcacttttattctgatttatttttgtgattgatgagaaaatcgatgagatgtcttcttcatccgtttacttcttgattactgtttatctattttcctccttttgtcttctttattctcttatcttttgttcttttctcgataatgtaaatagggtgttggcttaaatctggatgatgcacttgcattttggaggtcagagttctctaaaaaggtaagcacacttcttgcacatgatctacgatggaagtattcgaaattatatattttcagctacatgaatagtgaattagaatttcaacagttttagactctgataatttttgcacattatttcataatacttttaaatcattctgaagatgtatacctggtctagacaatgtattccatatctctctagacatctttatatggtctttgaatagattttttataagcttctttcttttaaaaaattacatcaattaattaaatgtaagatctcgttgtaggttggtttggagaagtttgagaaacaatatgcatacaacatacgccataattatggaaaggaagggaagagaactgtaagttttgaatttccccaccgatttatgggatgtttcaaatatatttctgttgctgatttcctttttgaaacacaaactttcaatgtttttgtatgcataatgcatgtatatgatgatgagtttcaacaagtaatgttttgatggatgttacaggattatactccctattcttgtcaaaagattatttcatcaactcctggagctggagatcatcatggttgcccctatcgacatttcaggtcactcttaatactcgtgctatcaaatggatagttttgctttctgtattggagatgtgaaatagataagttattgtcgagtatattttacttgataaatgctttaataaaattataactctgccttttggtgtcacaagtcttgctttctaaagactatgatctgtagtgaaattgtgatgggaaccaggcaaatcctcggttcgcaaaccaggcaagccacccatttggaagatgtacactagcagacagcaataggaaacggcaggagtaactgctgcgtgagagttgtaaatagaaaataattagtaaaaattctttattaggagcatagtggtagtaggaaactgcctaatggcagttattcatagaaaataactagtaattagttatatattaagagtataactgatattaaggtctgtaattaggcaagtgtgttattaattgcagtttgtggacacagtattctgtaggagacttttgtctatggcgttgcaagtgcaactatagtattatattttattaatctatatttgattttctctcagattatttgtttctcttgactgtactacaatatttatttatctctctttgctgatgagtaagttatggttttactataaactaaagcacgtaagcatgctacaccttatttgcattctgtttctgctaaatacattttcgggattattattattaataactcaatcattgtaataacaaatttttgtcattgacgaacctaatagtggaatgattcaagagcaatttaaacccctgtattatgcttacaaatttttacttcgtagtttgtaggcagcaaacaagtgcttgaatgatatatttagtaattttatgttgaaaatgataatgcacttaagaaatagtattttcatgtaatatcttgtatctcatgttaaaatgctaattgtttatgggtattagtgtctaggacgttgcactaaatcaatatcagcttagtaataatccccactgcatctattaggagtctccctctgtccgtgtctgtgtgtgtctttgtggatcacttgcataacctatgcactacagctctcttaaataagaaagcattcatattctgtattctctccaaaactctgttctttcttcatccttctctccctctctaaattcaacgtactacactgttttagaaataatgactttcgtatgtctgtactctgttaatgtaatgaatattttagttgtaatttgggcatagcataaagcttggctctattcttggtcatgttctttgatcttgatatgcatgcatagttgtgaggggtagatcgaaccacagggagtaagctgcacatctgacaaagttgaagggggttataatttactaatttttaattattgttggaaatgcttattctgttcggattccttactggacagtattttatttattttgtacggacattgggatatgacatttaattgacgctatttgaatttaatagtgaagagaatctaagagctgctctcagcagaatgggggtaaacagccgagcgatggaagatgtgatggacaaagtgagaaatagacattatcaggtaggtcttagcacaacccgctgaacttcaataatcaattttcaacctttggatttgatatctgattatatggataacgtttgagcagttggcttgcaccttgacatttgaagctcttcatggcatgccgtgtgatgcagggattaaccatccaaatcaatacttcagtgacagtcaaaagatattaaagccaaaggtagcctacagtttacaaattgtgattcaaaccaaatacttgttaattacagctgatatgatgcaatgtctttgttgaatacattttttttttctctctcttcataatacagtcgacaagtgtaatctgatataagcctactacttgtcacctgtattgtgattatacatttcttattagtatgaatgtgaaaactgaaaacgatacatcaagttatcaattaatcatgacgacagtgaaagcagtcttgcattaaaatataatacaagaatcataataagctactggcatatcctggatagataataaattgcaaactgcaaagtcccccacctaatcttttcgatgtttaatgaagaatggcaagattatatacacaaaagtagatgtagcaatgcacatagcaatccagatagacacgtgtcctggttggaagacaacttttctcttttattcttgcctttcaacacactaaacctgaactgaaggatatgtttaatatcaaattataacaatttccactattaaaagagggagatagtcaatatcggtggataaatgcaattgttattatccccaagagttctgcaataccccttggttagtcaaagtttctaacggttttggagtatgtaattccaacataccacagtacgtgcaacatataggtggacccttataatacagtaaatagtatcactaacgtgatatttattttttgctgatgctgactttgctgacctgaataccttgtaatctgctctctgcttactcacataacgtgatatttaattatttattcttcatcattattatttttttaatgcagaaggattcttcaacctaagtaatttagttattgcagaagactggtgctggggcctttctcaggttgacttttgagccttctgtcttctttttccacattgttttcagtacctttcttgttctgtttccttctggttgtattcgaagctgaaaaaatatgctacttatttttgtaaatcgaaataatatatgtttgcattcattaaaatatatgttgataaactaacgaacattttgcacattttaaatttcatataggtgtcacacgttggtgcctctagtcatggatttgcagagagagacaatgtggtaaaatcttaaatgtagcttccaaagcagtttggaggcaggagttggaattcgagtcatgtattatcctgaaagtctggttgaaaatacggcacaactagatattctttgtagtatacttttcatcttttagccaaacacttgcatgtaaccctgttaattcaggtaggcgtgaaatgggaagtattgtagcataattatgcgatgaaactgtacagtataaaaatgacactcatgaatcatggtggagtatcggatcctaaggcaatcatttaagccttcccaactcaaatgaggcaggggaacctttcaaggaagataggtgcaattaacttttgatatgggttatatgatgccacaaatattccaacttccggatgttatgtacttataatacccagaagatttaatcatttaatttttttagcccaggtgctggcagtaaaatgttcattctttaatctttttccgtaaaatggttatgaattataaatggttcattctttttccctgagattcatatgcctattacatcttttatatgacttagaataatgagtttaatgattatatattaagcagtgtaaactaattttatattaacataattataatttatcgttgaaatgatttttaagatatttattgtaaaataaatacacttattatatatgataattggtattagatgacaatgaattgttttaccctgtttaattcaataaatcaatccggatcccccctttattgagccaacccataacttttcaaatctaacttgaacttcttatggataaaaaaaattaattctttttctgtttcaaggaagaaaaaaaaggataagttttgcttaggtcaaaataagcattaaataattctcttcaaaataaaagaacgaaaacataatatagttctttttaaaaaattgaaaaactctttttttttttttaaattttagctgttcataacaaattttaatagcaattatttattcttttcattctcattttcacatgaaaaagagtcctctcatatatatataaaaaagtaaatcaacccatgtgtaatgtgtggtgacgagttaagtgactttaagtctttagcaactctaattatgtaccccagaattttttttttacaagtacacaaaaaaaaatcctctaattttgacatgtgaaaaattttgtggattgcaacaaggattgataggtttcacatgttgataagtcaagcaaccatgtaacgcatgtgattcaatatggtgaatcgaggatatagagggaagtcatgtctactattttcgtggctggcaatcaaactatcctccttcagccatgcataaattgcaggtaaaatttatcataattaagaaattttggcaacaggctctaactttgcaatttatctccatccattgatctggcgcatgccatagatgctgtctttgtcaagtacctcaccacctcataaatggatggagaaaagtgcaacagaataatattcatgaaaattccatgtgcatggagcatccattaacaaccccatcatcaaaagcatatgaagcctttattattattattattattattattattattattattattattattattattattattattattattattattagttaaaaaaacaggcacttcataccttaattatctttttttagttagatgtagttgtaataactgttgtgttgaaaaactaactatttgtcattttagatggtttttaagagtagttaaaggataaattaggaataataaatatgtacacaaaatgagataattgtatttattaataggtatagattattattactactgatgaaaaacaaacactccgtgtcttaattatctttttttacttatatgtaattataacaactgtactattgaaaagttagtatacaaaaactacttgtaattatggatgattttaaaaattaattgaagagtaaattaaaaataacaaatgtgtatataaaatgagataattgtctttattaataggtatatattattattattattattattattattattattattactaattatttttaaaaataaatcactaaaataaagtttatctttttcaacaaaatatttttcattcacataattaaaaatcaaactcctaataatatacttaaaaaaattcagctatctgccaacttaagatggttgtttatagggacagtgacaaatctgaagagaaattcttgagtgggtataaactcaactcctcattcttacacataatcaataaacaattataactgaaaaataaaaacaaaaataattaatccaaccgtctatcaggatcaattacaaaagtaacaagtaatgataagattattttaattattactttatttacagaatgccaatttaattttatatactcataaaatcataaaaaaaagtcacctaagacgtttaaagtggcttttgtttaactcactaatggaattttcgatatatgaactctttggttcaaatttcaataattttattgatttttatgatatttattataaagtcgtattaaggattatttctaattaattcacagtatttttttttacaatggcatgtctatataaattaaagtaaaaagaatgacttttgtttgattaattttatacaactaatacaagtttaaattgtgcatgtaaatttataaattaaaatccatttaaatatttacatgaacaattaaaataagacaagccgtaatgtcaattttagagtctaaattaaatgacgattatttaaattagtgactaaattttgttttttcgtaagaaaatatcatgattcaaaacgactgataataatatttactaaaaaaggaactaaattgatattttattctattaaattcactcaattaataactattttataaaatcatgaaataaaactgatgtaacagtagttttaatgtttatgatattaaccatccctaattttttttttcccgcatgagtactctttaggaataaacatcgtacttacgacagtgagtgagagagagaggattacaaaagcttgtatattccaatctatagtctagagttaaatagggttccttgttgtattcgaagatccattgtattgttggtggtagtggtagagtgaggaccataatggagttttggattcacacagcattattgtggcacttttctccgtcgcacgccaatttctttatgtgttggggtttgaaccctttgttttctcttagttacaggcaagttgagagtgactttcatataatgcatatgacatacacatacggcttgcatgtgttatgtaataaacctccatacataaataaatgttgtcacctcacatatatcatccctcgctttccataccaattaaatcaccttcttgtctttgtgtattaaatattaatcccaaataaaattataagattaatttggtgattaaaaaaatcaaggaaaaaatcatggattttaatctcttctattaacaaaactaacatattgataattaacatcgatcttttaaaaaaaatgaaaaatcaacaccaacttaaatgatttatgaaaggaattttatgtgaagagaaacgtttgttattgataaaacttactttcaattatcaataggattttctttatcaagttaagtttcaaaacattattttacaatttaaagaaattagtttctgaaaaatcaagaataattttatgaatttaatgatcatgcatgcattgataatgtaaaatattttttacattgtcatctaatcatgattcattgttaatataacttttaaaataattaatgtgttgtaaaagataataaatttacataagataattgtgattgaatcaatatataactctttttctctaattttatttactcacattaaaaacttaaaagtaaaaagtaagggattttattagtcaattgatcaattaacactgataaatttctgctgctctttcaatatatttttggaagtagccatttagaaatgtggcaatagaagcgcatttattttagtcatcactttcaaccagcttagtgaaaattggaatcactttacggttatggctgcagtagaaagtaggcaaattgaaattgtatctgacgtaacatgtgataggctaacaaaactgtaattctttcaaaccagttaactggtatatgttaatttgtaacattgctgatgggtcaatgacattccttgctcttcaataatttctttaattatggtgttaataatttcatccctgaaattgaacaaatttgtttaacgctttaacctcaatgaacacctaaaaatgatcattggcccagtatatttatattctccaactaaggtagtctcaagtttaattaaagtctcatctttctaccaagtgtacttgaaattaatctgctctagagcctcacctacttttgtggcatgccaacaacagagtaattaatttgcaataattaaaggatttgaatccatatccaagtttgataattgaagcacttggatgtgtacctctctcatcagtcatcactagcatgcactatgaaacatgatgtacaagatattttgcattgggcagactttagtgcaggatttatatacaaatcagagcttctaaccatgaaagacctcaagacaaaattggtaaaatttaatcttttatatatgttggggtccgctgttatcaacataataatggagctcattgagtggggctatatgcagtcgcttttcaaactctgcttttctcgtgtgtggtggttggaacttttcaagtacccataactttgtttttccatcgtgaactggtagtacagcatcagtcgtgttcctcctttcacaaagtcctttttattagtttgaataacaatgaggtacaatgatcatgaccaaacaggaatcacagatgaggtattgatattaaaagttttcaagttataataacttgtatatatatcccatttgtttttatacacacgtacgggctttttgtttaagtagcttgtacagttgtacttgtataaagcttattttgagactactactagcatatctttaaaatatttaatgaaaaacttgtaaattatttaggctaattaagattatcatcttttttttcccgtaacgtatatataagagataatgtgagtcgcaatcatcttagataatttacagtaattttaacttggacaattatttaaagaattaacaataaaatctggctgtacatgtttttcgatctttatttttttttatagatgggttttatgataactcagtaggaagttcattcaaaatgatttggattcaatatagatcatgcatggatatgatggttaattatattgaaagttattatataaaagatcatgacatgaccattttaaaaagtaatcacatgactatgtgatttaatctcaactcgttatgatcttatcacttggataagattttactcatttcattttctcctaatgaaagttttattctcacttgatatgtcccctctcgttattgtgatggttgggtttgtgatgagatgaaaaaccaaaaaaatcatttttaagttaagaaacatgccggagtagccaccatgggtttattttatatatgaaaatcttggaaaaaccttttaaaaggaaaaaaatctctaaaactaccatgttgttggaacacaaggaatatttatcagtcaaaacaaattttattacttttaaaacaagagaaaaattaagaaaatatttttttaaacaaagatggccctcttcctcctatcgatctatacctgagtttaacaaattatattcatgttttttgtttgcaaataaaaaaaataagtctttctcgataatcaaacaagaaatgtatctaaaatgactatcattaaacctttatttttaatagacaagtgttgcttgtctgatggacatatataagtgatcagatatagattcacttcaagggctataaaaaggaaatgactagaaattaccatatgcttcacctattcaaatttggatgacttagatgatgatgcatgaggcttggagattttacagcagtgcaatcaatagacaatgaagtttgaaaatatatagtaaagcccatttgattcatatcctgggcaaatcgtttatctcataccctgatcctgtatacaaaaaaaagacttattagtaaagattaaaaataatcaagagtgtgaatgagttgattgattgagagtaaattgaaaggaggattgggtactaagagaacaaaatgtaaatatattacagatttatggcttgacccgtgcttgaattgtgaccttagctatatgatgagaaattttgggttgtaataattttgagaaaaaaaaatgagagattgctataccatcaatatgattagaagcaacagaatcccaatatttaggatatgacatatgataagtaagagagacaaatcacagaattaccagtttatgcaaagattactaaaatttacttggttgcttgaattagtcgagatactcatactcaacataggataagatgttcatcagactcattggcatggatgtgaacttagacaccaatatgaacggaataaataatttgaactaatattcgcatgtccatcagtccatgtacatcagtacattattggtagacaaggaatacataggtaaaaaaagaatatcataaatcataattaatcctacaattgagttaatgagaaaagcctaaatcaccgtcttaattacgataactagaaaactaatattaatgattgtaaaataaataagaaaaaagaaaacatttaggactaataaataattataataaaaaacttttaactagaatctaattttttttataaaattaagtgtgtttgtccacatgttaattaacacatataaaaccaaaaaagtgataaatatgatcgatgtaaaaagaattttttatattaattataattacaaccaatgtaaaaaataagatcagccatatacattatttttatattacaacttttatgtaaataattttttattttatttgtttcttatttttgtgaaaaagccccttttgattcatacactgtcatcttgcgttagcacaggcgtgtactcaggaatgccatcgagctggtcttaacttttcttttttttttaaaaaacaaatcatagttaaaactgaaaataataatttcaatcgcaaaggaaaaagaagcagaacgaaagtttgtttgatttagttttagtccaatttttactagtcctcctcctttatcaataggtagcaatccattgtagaacaacttatatatttactcttacaatttttattatatttaaaacgaaagagacggggtttcgtatagaaacacagcacaagttataatgtgagcccacttgctaattacgacgtgacttgtttaaagggaagtgccaaatttggattaaggtccacgtgctattatgttgatgcagatgttgttcgccttaaaatggtagagtttctgacaccccctatgtgctattttgcaatggacccacgcattcaactctatttactcatccacgtctttttcccttacccatccaaccatggtccccaccacatactacaaagttctacctccatctcatttgttcaactttctttgtctttcattcatcatcatttcctatttctttcttcttcttttttaaccataggattctggaattttttattttacatttgattaattttctttcattagaccgattcattttgaagtaaaataatatctttaattatgaatttatatttaaaataaaaattaaaccctagttagacattaattaaaaaattcaagtatcaaatcccttgtttcaacaacttttattctcttttcttaacattaattttcctcctatcacttatttttaaacttgaacaaacaaactttaacttgcatgtaatgcccttaattatttgtctgatatttaattatccatttttcttaaaaatatgatatggtaatttatttttataaaacacatgcacatcatacgtgtattttctcatttaattaagggattcaaaatagtttagatcgtggacgagtctagtccggcatgacctaaattaggctaaaatgcgtgctagtttcgaagaacaaagacgtacgtagttgtcttccctttaatattgtttctaattctatacatgtggtagttgcatagtaattgctaatatatgtattccagatgtgaggatttgatggtctgattcaacataaggacttattgtggcccaacacagaaacaaaagctcttccacttctagcgtccttccctagttgcgacttgcgatccagagaaaaaatttcaaaactaaaaagaagctatagaggtaatggcggttgaaagataaatgtaaaaattagaatatgccttatattgactttgtcacattccttgtttgcaccaaagacgcaaagttgtacaagttccatgcagagtttattcatgtccgtgtgtggtgatttttcccactatatacacatataaactacgtatataactatataagtatattcatttcacattatatattttcaacatcttaaggaggtaactttcgcaaaggaaaatatgatgtcttcgataaataatacgtaaaatataatacgtaaagtatgattatacatacgtaaatttgaagtataaaaatggctttattctcatgacttttgtaatgacgttactctagcctataagattgtaaaagtattggaaatgatttgacattgaccatcacagttccttctcttccacgggtggaggacagagtgttaataagtctttgacggttgggtagattggcaaattaaagccacaccatgtgggccactatgactaatgacaaaagtgttgaattgacaaggaaagttgtatttacattaattttaacgcataaaaatatgcacagtaaaaaaatattaagataaaagtcataaagcgattgatgtggtttaaaaaaccaacaaaataaaattatagtatcagtagtataaattaattgaaaataaaggcacatataaaagcgtattgagggttgatttcgctttatttgaagttagaattaaacaaatcaaattaatcaaactaactgagttacattggttcacacattagataattagtttttgaattttacggatgacttagttgttaataattattgatgattattttaaataatttttaatttaattttcattacattatgctaaaataaattaagaagtcacgtaaattacatttaaaaaaacatatataaataaaaaaataagaaatcataatatatgtaaaaaaaaatcattattacaacaaccaaaaatatgatatacaattataataataaaaaattaaagacctaggtatttatcataattctcatgaaaacagttatagttgtaatcgtgatgataggtggtgccattgactataatatcggccacgagttgttccctgcttcatggactctatcacgccctaagttcaacgattttttaagattggtttgatcgaaccttagagttggaagaaatgtgagactctagttgggtggtaattggcacttaggttactagtgtcatagatagacctcttcgtcttcccaccactcctttttatccgcatgttcaagcacactcactctaatgttagggatttaagggagtctcagttcaatttaagatagagcaacttttttcttttatatactatagtagtgtaatcaaattaaattcttattgtaaagaataaatatataattgaatacatggctgtttaaaaacttttatactttaagaatattttgattaaattctattaattattgttcatattatatctttcacaatttcattatacgttaactagctgaaacatattttattcttgaggttatttaattagacaaatactaactaatgatctaagaacattgattaaaggattcaaagtataatttttttatagaaaagtaaaaaattatgttattcataatctttccgtattttcttataatttatataataaatattttttcttttaaatttcttaattttgactaataacactaattaattaaactctttaatttaatagtaaaatacataaaagaatctatagtactaaagacagtttctcactcgttacagaaaatctttcgctctcactttcaagaaagaaggagaggaaagagaaaaaaccgtgggagtctcaatcatcaaagcagagccagaaccatatttgtatgaggctaatatccagttgattggtcaattccatggtccaccagccagtagttcctgttacgttggaccacaccacagttttccccgaacgaacgagcccaagtagtcttgacatatatcttgctccatgcacataataaaatcatagttaattattgttggtgcaccagtgtgctgggtcccatgatgtttccatcttcgattcgatgccccaattcagattgttcatggttcacttcatttccactgttcctcccctcctcaacacaacaacaacattggtaagtggttcatcagtatatatatgcatgtccatatatatatcatatatgtataccacatgggaccttgttcagtgttccagctaattcttaaccttatcgttttaaaaaaaaaaatctctctctctctgggatgtacgatcaagtgcatgaaatgcaagaatggcccaacccacgttctacttttcttgggtggtaaaattcaaagaaattggagtgttggtcgttggacatatgcttttatttgggggatgaagttgaattaagacatagcactccaatacccatatatatgtggtactattggagatacggtaatggatagttttagaacacagaagaggactggattggaatcaaataattattatggatggagatgatgtgtatatttaacatttcattattttactttgaatccaatgaaagctaacattaagcatccataatcaactcgtcagatttagcgtccagggtagacttaaatacacatacgaaacttccctaccactatcacatatttaggagttaggagatctgtaaaatcgaatcttacccatgtgctgcaaaggagagtgataaggtgccttaacttttgaaaatctatgaatatttgtgtaatattaatcatgccaatatcacatacacaaattgtatgttgtattattgaataattttatctcaaaatctactatcaattgaaatttcgtatcatatttataaattttattttaattcaaacttgtttaatattgtactaatatacataaaaaaattatgtaatatttacttttagaatataaaaataaaaaaatgtaattacatatttatagttgttcaactttgataaaatttaatagaaatagtttagtaatatataattaaaattcaatgattagattgatttataaaaataacatctttgtatataaaattgttgatggtgcaattaatatagcaaatgtgattttatgtcttattaaaatatatgtttttagttgttatcattaattttattttataaaccagtgttttggtatatataaaaaaagtttcaagttgtttaggagttaaaactaatgataatctatagacacacttatccttaaattcgttgaaatgtggacaataccttgaatatgttgtgcaaatgatgcaaaggttggaactatttcaatatatataaaaagtctcatgacgatttggagtcaaggtcttagtttataaacattcttctttgagatattgagatgtattttaaaaactaaattgtaagaaacatgtgagtcataatagacaatgccttaaatgtgataagtttaacgatgtagtcgatttcaagttagagccttaacattaaaaagagggtttaggtcacacacataaactatagacacacactccctttagcctccagtggagggttaccattccgctatgttgccccttaatccattatacattttaaggaaaaaatcatgagacttatgtcaagcaaaacgaataatatatacctctaatacaatgaatttaatgatgtggtagattataagtcaagaataagaggtgacatataaagtaatgatactttgctactcgctaattatatcattactcataaaaattaaaatggaaaaaaaacatgtattttaataaaaataaataaaaataaataaaaataatgagcatataaataaaaaataacaattattttagacaaaaatagtttttaaacctatgagattgaacaatatttatttcttggcacattcttccacttataacaaaggcataatttatgatatctacacacacaaaaaattcatttatttattaataaataaataactaccaagcattagaactacttttattagtataaccttatctaatggaatgagatttgttgttgtataaccttttgtctattgaaaaattaaacaatttgtaattgaagccctataataaaatttatcatactagcatttggtgtatttgatagtatataatgttttataccaatgaaattattttatagtgttaatagaaacttgaaatatctccaatttaaaatttgtcaaaaataaattatactaaaaaaaataatcacaacacttaacattttattttttaataaatactctagctagttgctaaaatagatttcttttcaattaacttattcattgaagcaaggttagaatctttgttgagagagaatatccacatccagtgtatcagatagtttcgaataaaattgtcagaaaaaatacacgtggaactaaaaataaaacttatcaaaatgagcaatatgaatatccttttaattgaactaaatcatgaataagaatagagtcaaatatgaggactgaagttcggctatatacttaaatataaaatgattctatatcggttttccgttagatattaacccgttatagacatgtttaactactagtgccaaaaaacatatttggctaaagttaattatttcttcaagctaaaatagttcttattttaattgattttggtacacaaagaccacacattactttcattgtaagcttctgacaaagcaccgatttggcatatcatgaattgcagccatcatgttggtttccaaaattttccataaaataaggtatcaagaactgcaatccaagaagcgcatgatttggcaggaaaggtaataacatgtctagttgataggggtacgtttttccctcctcatatgaaacagaacatgatctccaacccttttcagaactcttctaaattagttccaagagctaggtcggtattcggtaaatgtcccttcgcaggaatatatggtggaattaatttaaaagcttttaattgttagttccgtaaaataaaacttaatgtggctacggataccaggcatttatttcaaaatttagaaattgaagttaatcataatgaattttttagataaacccttataaactactatggtagaatatgtaaactactaaacttttatgtcatttttatcccgtactagtttctctacagcacacatcaacggaagccagcatatatatataaacacgcaacacaacactggataagataaattataaatgcatcgcagaagaagggatcgaaatcagagtttagtgtatatagattcacttaaagaggaggtgtatgataattaagtaccaaaacaaaaatagaattttgcagtcgtgttgaaattaaatttgcttgttaagttctaataggtcccgcaaactaagtattatctagcagagattttctattttatttcttaaaactgtgataattaattactcatatttaaagatttaatgataaatatgaaaagaataaaattgtacatatattttaccgttcatttaaaatttaaagatgttaaaagtcataaaaatataattttgttacttacgtttttctaaatgtttatctactttttgttaaataatcataatttactttatatattattatacttttttagtatatttataatattatatatatatatatatattaaattttccctttaaagatatatatgttattatatttttatcctaaaacaatacggatggaaatcaagtggtcccttgttaatgggttagaagtaaagaaaaagattcgtgaatttaaagtatcaaaatattttggaggaatatcttaaactaaaataaatattcactctttcttattttaaaattgaccctacacaaattttaatatgatattaaaaaaaattagtgataaattgacccccccccggcccaaaaataaaaaaagttagggaaataaaggcttagtaaatcaaaacaaacttgtaacgttaaaaattcaaggaacaaaaaatgcatttaactaaacaatagaagtagttcaactttttcttttcttttctgaataaccccaagatgttggtaaagcatcgagataatgccaatcactacatgagagacgtgtcagacttatatttcgatctccgatctccattcaaacttaattagaaagaaacaatggtaaaagaacccggaaacttgtatgaaaaggttgacaaatgacaataagcttgcatatgaaaaaaaggtatgagttattgagacgttatttgtgaaaagaatctaaatatgttgtttcatgtttaagaaagttaatcttataacttgagtataacttgaaaaagaaaattcatagtttaagcatagttggttttaatgaatcatttataatatgtcatttcctaaaccattttatcttctctttaattttatgtgttttttccaaaaacattatgctaccacattttattatagaaaagagaaaaaaaaaaaaaaaaggtatgctgtaaatttatctttactttgtaattatttatctttgacatgataaaaaaattataaatttgagtagctcatctatactctatttcgcctcaacgttaattaaaaaaaaactaagtttaacctattcgagattagatttttggacaatttttcctcacacccttgaagtttcatttatttatttatttatatcagccaacaaagacaaata

SEQ ID NO: 36 - DNA, 274564 bp, Glycine tomentella
ttaatttattatattatatgttatgctttgaataaaaaataaaaaaatttaaactggactcacattgaagcgcaacaaaccaaataaaaaaagaaaaaaaaacactaaaaacatttggcccatatggcccaattcccttgaaaccctaagttactaagatcagttagcccgtgctactagctaaatgtcatcgccgtggcccacaagttaatgaaacgacttcccaaccctgtgttcaatcaatctgtgtccatttttccctcttccttcttctttttccctcacgaaacactcaccaaattgtgcatttgcagcgatggattattcgggctgcaactaccagcagaaaccacaacacattcctatggctacgatccttctcagatccaaatcccaccctacgaacaatcatatgcttaccaacaatactacacttacaatccccaatatgcgtattttcccaatgcatatcaaacccaatttcaattccaacctgaacccatctacttcaccctcctggcgtctaccccattgctcctgaacccaccttgcttcaccctcctggcgtctaccccgttgctcctgaacccaccatgcttcaccctcctggcgtctaccccatcgctcccgaacccgccttggtgaatttttctttaatcctttcaattcttgattatgttgtaattattatttctatttattctagtttttgtttgttagtttatttatgaaaggaaaattgtgaatgggtcatgatctaaggtaattggggatttgattgtgtgtttgagtgggattggctgtggataggaaatttggatgtgtttgatgatgaaatgtggttcatcaacctgtaaaataagtaagcaaggttttgtggtcgcggttgtggtttcgtcatgtttcttgatattgttggaaattgcggacaaatgttgcttgatgtggtcacaactgcagttgcattgcagttgctgacacctgaaaaagcttgacgccgctattgaaattgtgactgtggaccattttttttatagagaaatcacaagtgttgcatccacaattgtagtcaaaattgtggcaacaattgtggtcgtgctgcagttggggacgcccccaaaaccttgacgttgcattccaaattgtagttataatctttgtaacaactaacaagtaggtttttttggttgatttaaactgtgtattggtgattatcctataaactaatgtttggctgagtgccaggatggtgtgtgggttatgtcttacaactttgactcttaacattactcagggtgggatggcctacagaatccttatgggaaaactgtttgggattttgttactaggtagcctcatttaagtgccatattcagcttcctagaacaccattgtttagggtttttttgggtaaaatattccacaagaacttagctctattttagcctccattgtttcagactttataagttgatttttcttttcttttcatgtgtttattttttcttctgcctttagatttacttgttcacattttgctattttttaaatctaatttgttatgttctttttagattaatgtcaccatcatctttcatgttttggctccattactttgttcttattgatcctagattgatggtgatggtgtgtaaactgtgatttattatttatcatgaatatctttaatttttggtattttgtgctgtttttagtattcatatatgtagtatagacttcctctggtcctatatgtatgaaacaaatatgtaattcatcaagaccaataaaaatagttaaattagttaattgtaattaataatgtcttaaatttaaattttattccaaaaatacccagaactattatcacgagaaatgagcaaatgtctctttaatagatttcaaataaattaaagctataaaaagaaattaacaattaatatacttgaaagtttataattaggatttaggaccaaaagaatgttctcatttgtttcttatataaagaaccagaggtagtactatttagttgtatttatttaaaatagtggtaatcctgaggcctttgacttgtatctctgccactaaacaaaattaatagaaacaagcattggtataggatattttacatacatacagcaaaggctttgtatatataattgctccagtgagatcattgaaagagttgtattatattcaatggctaattgactatgccaatctgtttgggcttttaattagaacttgctagttgcttcggtgtggctgaaactagatgatttaagatagattgagtcaaagtcaagccatttgatatggtttattcctccttgactcaattcagaatatttgctgcttcagcaacatggcagtttcttaatttcctaccaaaaaggaaaaaaaaacatttgcagaagtaaacgtaaaaggatgattgaagattttgcaacacttaccttttatacattttgtaatgcttttagagtgaatagcttgcagtgctccctcagcctcttttgggaccttctctggacaaaagattgatactggattaggtattatatcctcagcttttcatctaaaaccttcagaagatgttgagaattctgcaaacttggccacaacaccctagagtgaccagataaagacaggagttgcataatataagcacaagctattgtggctcatatcatatctttgaagtcacaataatgccacatggtggtgggtctttgctggttgctttagaactgatgtgggcatcagatcatcttgtttctcttcttaactgtctggcctttcaaagtaacaatgcagtgcctcacagtttagaacaagaagaaacattgttcttttgttattcattggatataatttttattcgatatactttgttttctcttttgtttgaggatgtttcttttcagttcagacttggggaatcctgttatgagaattttggatcttcttgctgttattagtctgcattttcaattttggaataaaaaattgaagcttggtacatgaggcacccaccactaatttgaattttggatgtgaagttaaaagtgaaggattagtaatgaaattaaaagtgaagaaacacattaaaactaaaattgttaagctatgaagctgagtgcttaatcaactgtcaagttaattttccatttattatttagcttcagatctgattaaacctttgttataatgaccattggcaaacactggatgcatttaattttctattgaatttatgattaaggatttttcaagtgaatgccaaccttgttaatgtttcatattcagaattttgatttcaagatacatagattgaattatataagatttggaatgatacttaaaattgttgatgtcttgtgaagcagtttcagggccataatggttgttaatgtttgtgaaaatttaaaatgactttctattttaaaaagttccttgattattatcacttgcctgaaccagattttccttttctcgatccgttttatgtttatcaataactcttttccccagtattttcaagagtttagtaatcatgagtttttcattaattgacttatatttcatcatgttgagtgttgacagattattgtgacaagatgcattactgaaagtttagtttaataactgttttcttttacatttctctctccggacataactacccttgtgattttgtatcatttgtgtgcatatcttgtcattctaataatttcctctcaaaatttatcgttcatttattcctgataattgtaatcaatatatgcttgaattcctttgttaattcctatttacagactgggccatctcaatacagaggtaggggtggcaggggtggtagaccatttagaggggctggtcgtggtcgaggccatggtaggggacatggagtggggggtggtagacacataccatctcattcttctggacctgctttttctaatgtgccagctcaagtgcaaataccagtaccaccacgtaaaatgtgctgtgaaatttgtaaggttgagtgcaatagtccagaaatcttggagcaacacaagcttgggaggaaacatcagaagaatatgagggtgcatgaagaatcgcaaagacgcaacgctataaatggacaacagagtggggaaattcctacttctcaattgaatttaacagaccagcctaaggaagttctggagtccgagaaaaatgaacgccccacagaaaatatgggctctggggttataatcaataatcacaaggaggaaatacagctgcagaataatgtaggaaacatttctgaggttccagctgaagtgcccgagggaaaaaccaaggataactctgctgcaagatgccgaggattgaagcggaagaagaaaggaggaaaaggaggtaaatacatgagaactaatgatggttcaaagccagtggaacctgcacaaactatgtcttttagatgtgagctgtgtgatgttaaatgtgagtcacaagttgtttaccagagtcatgtgactgggaaaaacacttatcaaaactaaggcgtgcttcatctggagtaggcctgcaccagcagcaagctctgtctggggcattctttggacttcaagcaatttacccacctgacatcaatgctctgtctaatgcaattaatgttcaagtccaacaaggtgataatgatccgcaggtacttttggctcagctcctaatgactgtactatctcaagcacaggttccagcaacagcaccagtgacaggtgccgtggctgctgagatgccagcaccatctatggctggaccgagttatgaaccccagttgttgcagacaaatccttctggggaaacaaaaactgagctgccaggttcaagtgtcggcacccaaattgaaggtggaggttctgaaactaaacaacaggtgtgaagcttcagatagtgctggtggtgctgacatctgcagccaattcaggtaaagcaaatggccaagtaaccttcggaatatgaagctcccaccacttggtatggccaaagaagatttaatcactctctttctttagttttttcactttttaggcccgaagggttgttaactatatgttgggattttcttttgtcagagggagatttgaatactgtaggatttgctcatatgaatgttagaatgtgtcagaaacgctttatgttacttcaatgtgcaaaataccttattgggaccggattagtgaacatgaacatgttaggataatgcagtttaacatttaagaaaactgataagtttaaaattttctgttatgacgtgtagaaaagttttttttttcatttgcaacgggttctttaaacctgaagcatgaaacaagttgaacaggaattttttggttacaaaaactgtatgtctaacgagtgaaacgatggtggaggaggataaactaaagaatcagattacttttttaaatttgaatttatcaagattatgattatgattaggtgtcaaatattgcagaagtaaaaatatagcatttacatatggttcatactttatgatatgtattaacgctgtgtatggtttaagagatggatataatatagggaggatggaaataattttggaggttgggtggagaaaaaataaggagaaaataagtttaaaattagtgagactcatgtgtactactagtctttctatttccctcctcatttcttctctattttttctgcatcaaacttatcaatatttatcacttattcctactcttttttatctactctatttttctccctaccaagcaacctaaatgccccgcttcaactatatgctggtattagtttaacaaggtaaaataaacagcaccagtgacctgggttggtaaaaaaattacacgacttttttttttaaaatgaaaaaacaaatatagtacgcttacaaaattatatttttgattttttttactttcatatactaatctcccgtctcaaggaagtagagtactagttatgaaaaaattaattttttttatgtgtcattctattcacatagttaatgattgaacctctgatatatatttgaaggaccaaagttacttgtcacttgtatcaaattttatgattaataaattttgatttaaatatatttttcgtttttgtaaaattcacaaaatttgaattttgtatctgtaatttatttttcaatgagtgaacaatacacgaagcaagaattttgtaactaactgattcaaaactcaaaatagatgggaaactccccttcaatggtcatgaaaagttctttgcctataaatataatttcaaatggcattaaacaatggcatagaagattttaagacagactatggtgaaagtaaaggggagagaaatttaacatgaattagaaatagatctatatacggggtcttggtccaatagaaggatggaaagaagttgtcataaaattatgtcatttttttagtgtataatttttttaggttacatatataaataatattatatttatttcagttatatatataatccatgtaaaaaagattagatttataattatctatacatctatactacttaatactattgataaataaaatatgatattttggtatacctatttcttttcttattttatcctcaaaatcactttttttctaaaaaaaaaattatctctatagttactcctttcaaccaatccacatccgcacacatcctaaaaattattcaatattatttttatttctcaaaaaaattagagaaacattatacataatcaatataaaaaaaatcattttgtataaatttgacggaaaacatttttgtgtaaaaatttgtagtgtttgtactagacagagattagaaaaaaggtgctatgaaaaaattgtcattttaatttatctctttctttccctttgcaactctctccctctctcgttgcaataatgtggacgcagcaagtgctgcctctaccaccccacaaaccgtttcttcgttattcaccttcgaacccatcctttgtaaatggtaaaaatggttattgcagagtaaaggcattgactttggatgaacttcccccaaacgcgcttcggaagaagagagagccgcaatggagaggaggcttcagcctcggactcgacttgggtttggctcgcactggcctcgccctcagcaaaggcttctctattcgccctttaaccgtaacagtttctctttttctccttttcttttaaggtttttcaattttcactttagtgtttctgtgaaatttggatgaattgagcatgtaatttgataccatgttttgggttctttgtccattttgtgaacttcttctcgaaatgttggaattaaatttggatgaagttacttgtgaggaaaaattactttttagtccctatgcttaaaaatcctctttgggtgtattcgattaagattttacaaaagacttttaggattttaggaatgtaatgacttttaagattcttttaaaaacttttatgattaggattttgtagtttggattttaatagatttacaaccaatgaattcttaagattttaaaggattttataaattcttagaaaacattcaaattttaacaaataaatgataatttttgatttttcgcaaacagtcagctttaagggaattttcacaaacagcttgcaggcatgatttaatggagaagctatgaggacgttcataagctgatgaagaaaaaaagagaaaacaaggagaagcttatggctttaaagtgatagaagttcatttgctctgttatttttgtttagaagtttgatgttgtgtgtccaagctagaagatatcaagctctatgttaatctcatcacttctcaagcagtggacctttttttctctgttttggtggcaagaagggatgactgtgcacattaatttgagagattactaataagagctgaatttgagacatatgtgcaaggaaaaagaggaagaaagaaaaagaggaagaaaccagtaggaaaaaaattgtttgaaaaatctcaagggttagattgtttggtgggcgtggtatttataatttctactaaaaaattccatgaaatccatcaaaatctattttagaaaaaatccattgaaatttgtggaattttgaataacgagactttttatatgttatgaaaaatcttaattgaatacaaatggattctattgtagtctttgaaaagtcctaatagtgttgattgaatataacaagccttatttttttcatttaaaagtcttgattgaataccacaagattttttaacaaaaaatgtcttttaaattccttcaaaatcttaattgaatgcacccccttagtccttgtacaagtacttacaaacattttggtcctactgtcacataaactttaccttttagttcttgccattttgtaaaggcagggatcaaaaggatccgaaagtacttctgcagtaaccaaagatgatcttttaagtgtaaggactaaaaggtaaagtttgtgtaactttatgaatgagttatttttcctttaataagtagtgacatgtcaaattgattcctaactcattattataggatatttggattagcttcatggtgaggaaaaattaattattttttcacggtgaaggtaaagctgcaaatagttgtagactctttcatggtagcacaatgattttgtgaggtagaattgattctgttgttttatcaaaacacactgtaagtgacatgccaagatttaatggaactatgattatggcagggaccaaatgtgctcacatatttaaaaatgatgataaaaaatatttaaaataaaaatgaaaataagacatactaaatcaaacccagatcatagagggactaaaaccaaagtttagtatacttgtaaggaataaaaatatgtttaaacattaaatttatgggtggagcacatggtaatattgtactacaactgataagaaaatgttgaagttgactgtgttgagattaatacatgtttaatactgcaagatcaattacgaattatgttatttgtgtttcatcagccatttatcctgataatcctgcagttactataggttttggaactgcgaggacagaagcttgaggttcagattattaacattgccgaagaagaggttttgattcattttatttcacttgtactacttggattggattgtatatctttgagggtattctaagtttgaaattgacatggttttgaaactgtaggaggttgatgagtttataattggacttccaaaatcttctgatgggaaggaaacaccacagtcgaacaaagtccgaagtgttgctggaaggcttgctgttcgagctgctgagaggtcaggcattttaatgaagctttgaatgtttaaactcttctatctctatttatgctttccaaaataagaaaacgaattgcattaggctgaattgtttattataagcttgatcattgttcacaataacattcttcttcaatgtcagttttatatattatactccatttttgaagctgctaaaccaccagaattaggagttatggtaatgcctccaatattcagtgattgaccttagcaattatattaagtggctttattcttctgtggccttaaatttccataaccaacaataaatttgtttaacttatatggtttctggagactggaattatggatggctccttataggggtttattgaattgattaatttctatttatatatcaactctatttcagaggttggagagtgtatctacaggatgagcatgggacaacaacagaagccatagatagaatgatcaacatgtaattgttttgaaacttatttattgattgtattatatcctttgcaattctagcttgagttttgtgtgaaatgaataatttcctaagtgatatggttatcttggcaatgatttggcatctgatgcattgtgaccaaagtgaaaagtttacacaaaggttatgctacttgcaggattttgtattcactatttatctagcgtattttattatcggagacagttatcatatgcttcataaagggaaattgagggaaaagaaccctgtaaccttagtggatctcattctctcagagcatcatgttgaagttctttagtgttaataaactaaatgagtagttgggaatcaaaaccttcatctgttgataatacttgcttgtgaagaaatatgcatgctatctccaaaaactacgaatctttttatgtagtttgaggccattttggtataaaattgtttgcctatgaacatagatgttattctaaccctcacaccagcatggtttttattatgtgcttaacttctgagatcaggggaggcgccatgttagctaagggttcttggtcatggtataagaggaagtagtactataagatgcgagagtcaaatgaagattccttttaaaagctgtctatcaaaattttgtatccgaattttgtgttttattgggaaactgacacacttattactctttcagaggtttaaataagtcctctcagcagaagaaacttgatgcctatgctgccatggtaagtgaatatcatgtttgatgcctttttggcaatatagttcattcatacaaagttttgtatgaacttgggatatctaattttatgctccctttttggcaatatagtttcgtacaatgctccctcatttacacaagacatttctagaataatgactcttatcattttttttaacagatggtactggagagatatttctccacgtcaggtcagggtactgaacttgttttgcccaagaatctagaattacaagcaaaacttcaaaggggtcctcccaaagatgttgattttttctcggatgaagactaatctcaggtttgctttgttccataagcttctatggtcaattttatggccgtgcctggtaagggttgacaacatgtttggaagcagcttacttgtaccattccttcatgattacaaattgcaattatgcatgagaaagttttcataaaagaaagatattccaacaatcagtgatcaacatgaagtatttagattttgtaacaggaaagggagagaagcaaggaaaccatgtctattcgaggcattaaaattattgtaaaaaatatatatttattcaacatgaagtttgagcttctgattattattattttcttgatccactctgttttccatgtgggatctgtagctattggcggtgaaatcatcctaatttttttaacccaattgattaatgaagtttgtgttttaagatcaattgaagttataatttgctcacatacaccttctaagaaataagtgggtgtatatttgtaactttctctaaggcgtttttcaaggttagttgtacttatgaattgctagcatactactaaaaaaacaagtgtgtgtaggttaacaaatttcatatagactcactcaaaaagtagagagaacgactctttcagtagagatttttttttaattattttaaaaagataattttaaattacatgattgtcctctaatttgtgtttgtctaaacaaaggaatgatgtgttttttgtctaacagaaacagtattcgatgttaacatacactttttacgtcacttaaagaaattttgtacatagtgagaatcgaacacggacaaaataaattgtttttacttatgtaaacgtaatagaattcacacgactaagtcaatcctttgaattataatttttaagtagttaattgattattaactaacttttactcttaattatttttatatggttatatggtttaaagttatggtgcttgcttttttaaaataagaatcattttgactaaatatgtctcatttagtcacattaatattgaccctatcaatatatatgcaactagggggattctaatgatattttctggcattttttgtacaactgattgaaatttagcaaaaattacaaattttggttgatgtaacttcaaatttaatgatttttctattctgatttaaaaggagactcacaaattggtaactttcaataaagtttagtcaatcatagagtattaaaaaaagagtatccagaaaggtgtcagtaatatttctccttataccaattctttgacttgactattgccaagtttaaaaaaattgtttgattagatcataagtttaaataataatataaattatgtgaaaatagtaactaattaactattaagttgccttaaaaaaactattaagttgaatggtctaagttaataaaacaaaagaaaaagttgaggtactaagacctaccataccaccatactgttattagggactaaaaatgtaactcctcataaaatgaaggtcaattttcataatttatctcttttggtagttgtgaaatataaaaaaaaaaaaaattgtcatgccctgttatacagataattcacatagtaagtcatgtgaaattcaatatgaatgttacctcatcacttaattaacattctaagttaacattgatttttgtcaaattttttaagttaacaacaaaattaaaaatggaaaggaaaaattcatgtggaattattgttggatatagggggagcaacaagaagaatgaatcctatgaattggaagaatgttttgagcttttcacatgtcttgaaaattatatttcaagtgaagtgtaggagagaccaatttttttatccttgcattgcatgcatataatcattaacatgcttaaatattttcattaaaatacaaaagctactcacactttgaaaaaagaattaattgagtaatatttttagaaaaatgtaatttcacaattttaatcgattattcaacgtattgattgattatttggttcatatttgaaactgaaaaagctttgatgaacactttaattgattacacaactcttgtaatcgattacatagtgtaaaatggattttgtgcattgatgtaataatcgattaccattatttgtaatcgattacataagctatttgaaaaaaacttgcttcattgctttaatcgattaccataaaatgtaatcgattacacaagctgtttctgaaataaaacttttctgttttaatcaattacaactcgaattaatcaattattttgttcgttttgaaacctagaatgtgccttgaacactttaatcgattaagtgacaatttaatcgattacataaactattttaattgattatttggcgcatgtaatctattacaggttgttacaaaagctgttataaatagaaaaaaggcttggcttggattgtgacttgaacacttcgaattttctgagtatacacaagccttctaagagttaaaaagtgattttctgggtttactaacttcttgtcccactctttaatcttcatgggtattaaatgatttcttgggaaagagatttcaaaagtgtaatggagagcatattctgaaattctgtttttgcaattcaaccttgattggtaattcatatgtattaatattcattggatcataaagttgtttttctccataatctttgattgtaatttcgttcttccaatttctgttatttgatgctattgtaaaagagttcttaaagcttgggctagagtagtgttctctaggaaagaacagagtaatgttctctagttcttgttcattagaagtctaatagaattttagatttctattatttatctagtgttgataaaaagagtttgttataaagcttgtaagaactaaaatttataataattgaactctaatctaatgttgattagaagaatctggatgtaacttctcttaagaagtgaaccagcataaaattgttttatctctatttttacaagtcatcttgttcatttgttcttggtgtcattatcattactcaacaagttctgttttgagctattggtttcttgaactgagtgatttgattgattaaaaacattcttgatttaaaagtgattaagattctttgactctgattttataaataaattttaaaaaatcaagtttaaaccaattcgccccctcttggttattgtgggtattcctattgtttttcaattataactagtcaaagttttattgaagaattaaaaatagaaataaaaaggtaacaaaacataattcacccattttaattttaaaagagaaaatcaaaataatcccatattaagcattttttttattttctcatactgttaattaaaaaaaatcagtttttctcaacgtttactgctttttaatcttttttttttttaattttgtattccttctgtttaaagttgtttctatagtttatttaaacaagacagtgagctgattcactgattttgaaattaaagtggccggttgaatcccatcccatttttaaaacttaagtctaaattgacttacgtatatataatatatgcatacgtataatttttaaaacatacgcatacttaatggattcgtactaaaattgacttcgtaccttcagttaatgggtagagtattcaatatgcatactaatttgcatactgttgaattcatctaatactgcttgtttaatctaattacactcaaatatatatatatatatatatatggatgaatatttactttataataaaattaggacctatttgaatataaatttctctagaagtatttttagaagaagaaaaaaatgaaatgaacttttccataagttaaaaataattttttatgagttcatttgtagatgttatctcatcttttagagaaattatattagtgaatttttaaaaattaactaatagagaacttatttttacttatagaaaaatttatctcattttttttttattttcttgttttaagtacttctaaaaataaaacttatcgaaacacgccttagtccgataccacggagtcttcagtgttattcttcttctttttttccttagcttctgtctattattaatttattattacattgtaattagttgcattcaaaagctttaccatgtgcgatggagaatatatcaatttttatataaatcaaatcatattgattctagttagtgtaaaaactctatcttccctttgtctttttcctgctataggggtgcgtttacttattttttttctatagaaagtgctttgtgtgcttagtgggttcgaagtttccatggcttcggtgccccttatatcttctcctaatgcttgttcaatcacaactcgtacctatataatgtcagctttcacattacccattacttaattacttctttgatttcattcatttttcttgtaaatcctttggtcatttttacattacaaattgtttaatttgctgactaatatgaggaaccttggtaattgtaggtggaaatctccggcggagtaaacactccaccaagaatatttactatgcaagtatgtatcagtctttcacattttaccttcatctgtaggtgaaatgtttagtagaaggaatcacttttaccttttatgagtcaagaaatattattagttacttcttttggtcctttatggtagattaggtataaatataattataagaaacataaatttactttcaaatattaatttttatttttttatatccttaatttactatgaaatctattaatagtatactcactcttctctatataagtggatgtatccattggtttatttaataacataagacacgtttattggtgaaaaaaatatcccttgaattataagtatggttattggattgaatataaccactacttaaaatatttaattctatgagtttttctaaaataaaatttaaatttataaaattattaattaaaacgactaattaacttaactacttcatgggtcctttgggaaggtttccaagttcaaaggaaagaaggattatttatttttatttcaaattaaaaatcaggtgatatttaatgaattcaaagaatttaattaaaataaagaatagtattaaatttatattaatatagtattttatatattttttaaattattaaattagaagatactaattcaaaataaataaaaaaatttccccacccttcaaaagttatatcctaagctgtctcttaacttgtgttaagattgggatggggttatggcccttttttgtttgtttgccttaataataaaaataatcaaagagtaaataaaaaattaaatatagttaaattaagataatacaatattcaataagtaatggaaagattatgggaccaattatatactacgtgaaaggttaaccaaagctatctagacaaaaatataaaatgttgaaaatatattgtttgcttcattttttccttttacacaatatgagtattttgtttaatgttgttcgtgttaaatttaattttgttcttctacattagtatttgcgagcgttatcttaaataccatttggatattaagagttttttttttatttaaaaaatagtatatactaacaataaatttaagcaaatgagcagtaaaaaaaactttaagcaaatgggtttatttttctcaatacaaaacaatcttatattttttttcaaaatgaaagtcaatctttaaaattaatttaatttccagtttttaaaaatcttcaaaatataattcatttcaaaattaaactcaaccttttttttaaagaaaaaccattttttttcaaagttaaagttaaccaactaacaataatattttcaaaattatgtgaattttagtttccaaacacctatgcatatataggagcaataattggactcgtcatccacaaaataaattccatttatcttaaaaaaatcaatttccttttaattgtctatatttcacaaaatttataaaatgtaatatactgccaaaatgcttaactaccctacttttagtccttatagttacaataacttttccttttaatctttatatatagtttaaaacatttattttggtccccatagttataatatttttatccttttggtccttggggtcaagtgttgacaaatgttgtttgaaacaaacataacacaactcatttaatttatgttcatctcaaatgtcattagaagaggatcaaaagggcaaaaaggacaactatgttttttttaaatagaaagttgttgtaactagagaaaaacaaaaataggaaacaatcaaaatcaattccatttttctatgtataaatgattatatattgaatccaaaactatattttttataactaattttttacattaaggggttttgttcaatgttttctctaaaactaaattttggtggtaatttctcaattatgctttctcgattcatcatcttgtcgtgatcttggtagcaataattttaaaacaagaatctattttttgttgtgcatgcaccactaatactacattacattcaacctttggtgctctaggttttggtgaattaaaagcttcacaagagaaaagagcaactcaaactgaatataatcatttgaggttgcagcaatcaagtttgaaccattattacaaatgcattaaaggaggttctacatatcaacaatattaatgatgccattattatattttttaatggaatgatatataagaccaaaagacaaaaaagtaatttattattaatctatattattcatttctaatagtaagttttatacgttgcatgtctatttcaaagtcaatacaattgatatatagaactaacataaattgtgataagcaattgaggtatcatagaactggctatttgaagagaaataacatatttggagtcacatgtaaaacagcacagcaaaaaaatgatatatatatatatatatatatatatatgatagtttctcaactttaaggagagatgaaaaaattgtgcataatgtctgtccaaagacaaataaaaaagacagtttatttttactgaaaatgacatagttggaacattaaagttattgctattattcaaaaaagagtttagtacaaatgaattatattaagtattaatcaaacattcgaggacatagttgttttatttctctttttttttttaaaaaactttttttaatttattattggattcatttaccatcgatcccaattaacttaaattaaagatattgttgatgttaattaatcataacattcgaggattatttgagattaatattaaaaagttcgaaattactatgttaatcagtgagtatggatagtaaaccttgtagagaacaacaaacaaatttttcatagagtctaaaatgttttggggagcaaaagcatgaggttttaatctaaaattgttttacaccatgactacataaacattaacctcttgtttttttattacatacactccttcaaagcatttgtaatgatggtccaaacttgaccgttggaatccaagcacatcattatattctattaagttctccttttatgttgcgaagcttttgatgcccaagaaccaagagcaccaagggttggatgtagtatataaaagtaaaataaatttcgaaaactaagatcatgatgaaatgatgaatcaagaaaaaaaaatcaatttgaaaactaaagtaagagaagtcactatcaaaatttattttattattagagatggttatgttgctcgttacaaggcacattttgtcgccaaagggtttcataaacaaccagggctcagaaacgttcgatctggtaattaaaccccacattgctctttccaaaggttggaccttatctcacatagatgtcaatgcattcttgaatgggaccatccaagaagacatttacatggctcaaccatatggttttgtgcatcctaatcacagcctaaccatgtttgcaagttgaataaagccctttacagcctcaagcaagctcctcgggcttgcaacaatgcttttatatcatttctcttggcttatggtttcaccaatgtcaaatctgacacttcacttttttatttataaaaatgatcatgttacggcttattttcttgtgtatgtagatgatttgcgacatacaggaaacaagtttctcagggactttcaacaagctgtttccaacaattttcacttaaaaatctctgaagtccaagcgactttctagggattgagattttgtctacatctcaaggattgtttctcacccaacatcattatgttctgaagcttcttggtcacttcaatatgcaagattcaaagcctatcttaactccaatgtccacaaactcatcattgatttcctgtagatagttatagttgtgatttgactgcatacaggtgtttattagggtctcttcaggtgtttaattgttagctaatagaggactcaattttagcttgggaagaaactcaattcattttttttcttattttcttatcctagaagtgtttctagaaaagtttaatctttcacaatacctgacatgagacatctccttggcagtaaacaggctttccagaatatgtaatgccccactgatttacaaatgcaagcaactaaacttgtgttgcgtatctcaagggcaccattgatcatggtttacgattcaagcgagactcctcttattcacatcagattgcaagtccacgagggcttagctacatcatttacttttgatccaatcccatatcatggtcatgtaagaaacaaccaactgtggcaaagtcttcaacagaggccgaatattgaaccattggttccaccactacattagccactttaaatccaagaactgttaaaaagaccttcatcttccaccgtccagaaagactctggtggctggtgcacttggacaatcttggacaacttatctttgtgcaaatcctggatgaggcaccttataatagactaacattttgtgcttgatccagtcccttccaaacagcttcaagagttgcatgtttgttcaagtcaccagattgtggacctcttaacaaagccattatcaactgcgcgttttctgctactcaagtccaagattgtccgtttgagtattcattccttccacataacggaactttcgaaatctatcattttattagtggccatatttataaattttaagagtggtaaaaaggctaattcctgcttgtctacaactcaaataatggttattctctgctctattgtcgaaactcaaaccttaagttagttgacgcaatgagaaacaaaggaaaatagttagttcccttagtggactatactacatggtattgtaaagctagaagaatttattacttttaaaatctcaccataacttacaaagaagccctatgttgaggatcaccttagatcttttaacaagatctagtgtactcttaatttaattcattttacacaaataattgcttactttgtcaacttctgagaacttctagaaagttatacaattatttctctaacttcagtctttaccaaacatgatataccccaatcatttgacgcaactagaacgatttatcgcatcatattttttcaagcgatcaagtccatccaacttgttctatagttgctttcacgttccatcctaactatgcagcagaaaacctgtaagagtagaaagctagaggtggtgaacaaaacaagcagagatgaaacaaacttccaccttgtacacaatcagtcaagccagaggtagacgacagaaacttgcattacccgtgaactagaaagcattttttttttcagcagcaaagagaaggtaaatggatttatttaactgaggtgaataaacgaaaagtggaagcaacaagactcaacaatagaatacaatttcgattgcaacgtcatactttcatatgcataaatgatcaagaaatccatgagaaaagtatgaaacacggaccacagtactacatagcttgcagattaaattaaaattctaatatgcaaatttattttttttaatttaattagaatgcactgacagtgtaaaagttttttacaccatcgttcaatcaaaattcacaagttttttctttcaaagcagacattcttgttttcagcttttcctttaaaaaatcatgaaggcaagatagtaaacaaggtaacatttttgtaattattagtagaaacatatacacttaaaaagaaaacgaaaatcaaaacaaatgcatgctaagcacaaacgagatttcaatttcaacacgagtcaagcatcataaaaagggtggtccagtgcaaaaggcttacactcttttgatgtaggaagggtttacaggtacaaagcctctgctccattagtggataacttgtttctgaaacgtgaacctataatcaacatgtaaaaaagaaaccttacaattgcaccaaggcttaccctctaaaagtgtcgaataccaagcagcagccaaaaacaaaattaaagatcataccagttttataaataaagttttagagaacaataagatctttattcatatcagttggaagacaatgactgttaatttcatggtgtatttagccttagcaataagaaagttcatttatgttgcaaaacaaagttgatatgagggatttataatgtgtcccaaaactgtgcattttgatgtgaaaataattagaaaaaggaaaagacagatcaaatatcaagcaaaaaaaaaaactagtaagaagatcccccctggctttccaaataactccaaactaagtacatcaataagaaataaatcaaaatgttagaagcagatttcagtatagatgcttatatcagcaaacacactaaaaaaaatgagttcatgtagttcaggggactgagaaaaacttgcctgactttgatgttctttatgtaacaaagacgactcagtactcttgtgcatcaaattaccatctttggctcttcaaatcaactaaaaaagtgttaaaaaaaaagataaagaaatatttaaaagcaaatgatgcagaaattactaccaacttccaatcaaagaaatgtgcatacagttttgcatcagcaatgtctgacagaactccagatcagtgattgaacactatgtagcttgaaccaaccaagatgatcaagaccaactgatcaaccgggtctccatcagtacgacaacatttaggataaagtccttaactcatttcttgccaccatgtaactatgaaataactaatgaatacatgaaagcctggatttcaaagcatgaaaaagatattagatggtccaactttcacacccccgtttggaatgccagacctcagttagtgatcatctccatgtatactctgcatgaccagagtcaacatcaatatcaacatcaacagcacctttaacccaaattaattggggtcggtggtagatgaacccaatgataaatcgaaaataaagcaaaagagagaaacagagttaatttcatgaccagagtaacagaccatattttgacatgcataactttgcataagccaggaacctgcttaacagaaaaatttgactataaacataagttgaagaatgcataaataaaaaataacttgaaaataaaacacagctcagaatcataataaatactccaagtcaaagaacatacctactttatgagaacctacatgcatactatctaagtaacatgcagaagcatatgtattagagtatgtgactgtataactgtgtaaacacttttgtaatatgattgtaagggctaacagcaccctctgtgttaggctgttagttcctgttatggttagttcagaggttcagaggtctatatatacctcttttgtaactaactctaactaactgctgataaaaaaaaaaaaaaactctaactaactttttcagtctgaaataatatcagttttctctcttcttcctcccactttatcaaagaatatgaaaggaaagacacttattacccctaaaaagaaatgttgctagttaccaaaagcaaaaggtcagtatataaattaccagaaaaaggacagttgtgtctttcaagttttggatgagcagtctacttggaagatagaaaacgaaattcatagggtggccttttctgttttggttgtacaaacaaacagtcgtgtgttttagaagagtgagagataacagatgagagaaaataggagagaactgaactgagatattatttctgttatggaaaatttagttaggattagttacaagtgaggtatatataagcctctgatcagaaactaactaactacatgacagaaaataactaactacctaatacaaagaggtgctgttagcaaaggctaacagaccttaacaaagagaggtgctgtaaaagctaacagcacttacaaagcataatacaaaactgtttttaaggtttaaatacatattctaatatcccccctgaaactcaaggggaagagttttcaggggaaacactcttcacatcgagtttgctcctaagaaactcaaatcttgctgaggacagaggtttggtcagcacatcaacccactgatccagtgctggaatgtgtacaactgaaagctgtttggccagaattttttctctgacaaagaagacatcaatctccatatcctttgtacgactatggaaaaaaggattatgagcaatagacacggcactttgattatcacagaacagaagagtagttgtgaaggagacttgtaattcaaactctaaattcaacaatttggtttaatatgaagcaaaatcaaattagaaacatcttaacaattgctaacaatcattagtgaattgaactatacctttagacataataacatttcagtcttcatgtagtgagaatcttatgatatatcgagacttggaatgatttttggaagcagtctgtcaggtggccttgaacatgactcaccatcactatttaggaatttgagttcattttcaagaacagagtaagcttctgaaaatgcctgcaacaacattataactaatgagaaacacttcaagaaagtcaaattcatcaaagcataattcttaaataaaaccaatttcaatattcaagaatcttattttactgcaatatttaggtgattcaaggatgacaccataaattgttaataatatagtatacaatgattttgatgaacttcaagaagtttaaactcagtgtcagtactcaaaatatcataaatgtaattatgtacccattagagttctactaacataagccgccttaattgcaattatcctatgctaaaggggtccaagctactagccacttgtgggtacaccgcagcttaatattttagagtcaattatactataagtgttggaaacccgccttaattgctgtcacccatagagcaccttagttgtggcatctttgggctgccttaattccagaattgagggttattagaatatgtaaattatataactgtgctaacagtttgtaataggattgttaagtgtaaagctgtaattgtaagggctggtagctattgccaacagcacccctctgtacagctgccagtttctgttagctgttacagttttctgttaggagttagttagttattgttattttcagttgtagttagttcaggggttataaataccctctttgtaacaatcttcaactaactttcacattctggaaataatattcagagttcatttcagttctctcttctccttttctcatttcatctaaaaagggtgtgtttagtcccacatgactagggatatggcttaaataaagctaataaagcttggataatcctcaccttacaaatcagttttctagggttgaattaggccctaagcctaaattctaacagtaagttaacaaagcttgccagacttccaacaaaatttgtccatcctctacaactttcaagaatcatgaacacatttcctcttagaaaatatcaaactgacacatgccacattgttattcaaagtacatttgtcatccacatgaatttcaggcgcattgttgcataaaaagttatagacaccttgatcagttaataaagacattagaagcagctttactgctaaaattacatgaaagattttcttttttattggtttgaattatagatagtttaacagcttgtggataatataaaccacaggtttctttttcctgtcatcatggatagcaaaggccaagtatgacaactgaaatatggaaaagatgttggtaatcaataccttaatacattgatgtattcggaagcaattccttcccacattatttgttggaaaaagaggatcatctatgtgaattggatcaatgctgcaaagaaggtaattatcattaagctggagaaaaaggaatgatatcgcactgtagatagaaagtttggtttctatattacctacaacctctttctctttttatataaagtccacttccctgaactgatattctcatttggcgaggatcaaacacattcctaaaagaaaaaccattgaattgaattctaacaaaaaaatatgattatacaagtcctctctagtagcaacaataaaatatgtaattatgactagttctctcacccaaaaaagtaaagaaaatccatcagaaggcttccataattctgccagaaaatgcaagcgaaatttatttagtagcagtaaaatatctgaaatatataaaaaaaaaaaaaaggatctgaggaagtaaaaactacagttctccataacccagcttgttttttttatactaaatcctcatttgattacaagaaaaacaaaataagagtaaactctagtttttcattctctttaaattgtggcattatacccttagtttaataaaattttagaaaataatagaaaatattattattagtccacgatggccatcaacagatacagacttgaataactagagtgatcaaagtttacttggttgattggccggccaagatggtgctcatgctgaagaaatcgtataattagtaagacctgaatacaaatacaaaatgcaaaaacaaaacaaatgtgagtttagcagatacggactaaaacaatgacaatgacaaagcagcgtcattaaatccagaaagaaaatttttcaggagcaacatagttgcaaaatcaaattgggtttaagaggaagacaataagatatgttaaagtgtgtttcctacacagcttccacctcaatttcaaaaagcaagtgaatctaaagcacatattcccaagaaactgagatcataaaaatcttttttttcttcactttttccgctgatcatcactaaactgctgaggacaagattatataaaacaattatcatgccagttgcacttgcagatagatctgaaaatctaataaaatcaaagattcttcaaatcttcatagcctatctgaaaagctacgtcaatttgtgttactacagtagaaaagggactaagaaaattcattgaggaatgaaaactgaatgaaaaaaggaagcaatcatgcataccaaacagtaggaacttaagccaccagagtaggattgatcaaggctccgatcagccaaaaactgttttagtaccaatgcaaggggtgtagcagcaggaaattgctctgtcaactccttaacctacaggaagcagtatcataactttgaattaccaagcaaaataaagagaaccacatgatacatttgacctcaagtacagtatcaaagctgaatatagaacaactcatacacttagggttgattttgttgacagcccattggatctcaacaatcccaaccaatggactcgttcagttctgctgctcttaataatcaacaaaaaaaactagttgcgttatgctgtgtctaatccaagttcttgtgatatgttaactaaaccatgggatcaagctgaattatttaaaaatattccagggaggaggtacaagaggaaaatataagatataaatcaaagcattgaataaatatggcatcaagcttctttgaagtacaatttttgttgcatttcttctcatcaatgttgttaaaataagtggaccatttcactggtaggcatctaattctgcattctacatatgtaacaaagcaatcctaacaacccaccctaagtttatgcttggggttaaaatatatttgtgaaaaaaataaaatttaataaaaaaatagaaggtatttgttcatacaaattagcatgtttggtacaacatcaaagaaatttttctaacttcctgagtgagatttggggaaaaaaatattttccaaaaaatagtctatcccaatcaaataaataaagaaatttcttcaagatttatgattagacaaataaagtaggttactctccttgaactagggcatacatgtgtgtgtgcacacgcatcacacacacaagcttgcatgtccttttgaccaaaagatggataggtatccaacagaaaaagaaaatattaataaccatggaaacaggaagagtttatgtaattgagggccctatagacattagaaaatcaccatttctgtagtctggagtccagtatgtgatggggacttaaagctgatgtccagtctaactgattttgatttcaaggcatcaaatttcatttgggagcctttgggcgaagccaaatcttctaactgaatggtatccgattgattgtcattaccatgttctccaggagtacaatgtggcttttcatttaatgactgtatcataggagctaacgaggtaataacatcctgaggtacttccaccacaagcattataataggaatctgatagaaaaaagatacagaatgatatcttatcagaaatcaagataagagtacacttattaagtagataataacaattaacagcttaagagagaggaggtattacagctgtattttccactgtcttcagagaatcatttttcacccaatcctgattggcaagatacctagcagcatgctggcaaataagcataatagcatcaattgtctgatatacagaaaatcttcttgttcttattattactattgataaaaaatatacaaactaggaagcagacatcattatatccaccaataattttgttacaaagaagaagagaaagaataaacaacaatgcaataagaaattctctttacatgttgatcaaataaaatatcattcaaacagaattcgaaagattaattaacaagatctgtaacacgcaagttgtgcaggaagattgagaggtaaagcaaaacatgttttaatgtctcaattttcaggaaagtcatgttcaattcaagcctatccaaaatataaaggtccacaccaccaactagcttccagttttttcaaataaaaaaaccagtttgtaaagtatgaaagagaaagaaacaagtcaatgaactggcagggcaagtgcagcttattttatatcatagtgcacttcatatattcatggcaagtgtcaactcaaattctaatacaaatcctattaatgtagatgtgcacacccaacaggcaacaggtagatggagagtcaaaagtagggccacatttattgccaatattacctgaagacatgtttctttaattccattacgaccttccagtattccagcttctttaataggttcctgaatattttattacagaagttaaagaaagagtgttaatccatcatagttatgacatggcaagtaccacaaacaggagaaaaaaggaaaaaatttaccaggtttctcactggagggagtccaaccacaaggtcaacatcacttgttggaagggacataccagttgcatttgaaccaaatatgtttgtacgagatctgggccacagaacctgcagaaatcgggtaactctcttgacagcccaattaatgtaaggcctcctggccatattttctgcagcaacctggagtccattataatagttataagtaacatgataaggtttcgggtgatgatatcaagaaatgtaaggtttctacagattcaatagaaattctatttggaaagatattaaacaaaggactggaatgctgataagaaacaatgatgaaaatataaggataaagatactaaaacaagctatgtaaagttcaaatgtggatcattcagggaaaaaattagaatggacaggatgttatccactagcttgcaaaggagtatgtgagaagtgtgcaagtatgtttttttagtataacaaataagccctgtacctgtttacagaaagagtcgatctcatcatggagaatgccatgcatcaaagataaagatgcactctgtgcagaacagctttgtaactcgggaggttgcaaggggaaggtgacatctggctgtataattcaaaacccaaaatgaacaccaacatatacacataaagtaagacttgataaggatctttcttacgtgttcctggtcacgtgctatctgtgacaatgcaatcaggcggtcctgcagcaaggcagcaggtaaaggctgaatcaaaggtcgcaccgcaagattattacttctccaaggccacacaacttcagcaccatccgttcttaaacacgcttcctcgaaattactcccatcatgataccagcctcgcattccccagtgccttgggctggaactaccagatctaacagtgggaaaacccctgtgtttcctggagtcactcacaggggaaggtgggggtggacgaggtgcacgtggtacacaaagcactacaggtgatggtggccgctttatacgaggctgctcccgcctggagggaggaacacagggacttttatgatcaaatctttcccttgacaagttaggaataattattggccgtagaataggatatggatgtgaatcgcctgcctttccttcaacttctccaggcaaattattacccaaagaaccagaagtatcttcatccactgctgcatctgtaactgaagaagaatgcaacatctttccaggtacttcattacctgacatcacataaccaatagtctgggtagcagttcctacaggatcgaaaggagaacaaaatgtagcagtagtgggtgatgttaaaccattcgtactatacgaagatgagaaagcaaccatatcatccaccgtcctattcatgtcagcatcacgcaaagcccatagactgtcatcagagctaagcgagggaggccgggagaaacctttccctggatagtcagaagggttccagtacattacgcctccaccaaaatattgattataatctataccagaaacagtatgaacctcatactcttcctcagatacacagtgattgtcaaattcatcagctagctccaatgtatttgtcagctcaggtaaatcccatacatccccagaatattttctttcatcatcaggagcagttgcatcaacctgcatgttgtgaacagccaatccttttgaaaaggtacattgcttcctagatataaaaccagagtcatagttatagtttggtgatggggtcatgccaccacgaaaaactgggggccagtcgaaactcataggaataggaagagacaggattgggttgcatccaccttcaataggaggatttcttgcctgctgtaatgtgggaacaaatgggtggcagaagtgattatgccaattgcgcccaacatccagatgtaatctatctgtggcaggagggagatgtgagttaaaagatggaaaatagatagaaggtaagccaggccactcatatggactgcactttgagaaagctgaatttctactttcaaatagacatctatcacgctccttcaacaacccaaattcttttgcattaacctctctaattggtttgtcaggaagactggtctttaaatcagctttggcagcacatggtgagttcaaaggacaggtatcttccttgctgaagaaactaccttccaacgcaggaacaggagttgtggcagcagtacaatctatgtcgcaagttaaagtatctaatccagaacataaaattttcctttcatctgacaataaacaacactgaggacctaaactattgccacttttagcaaggtcttcagtctttccttcaactttcctggtagaactgttctccctactaagcccactaagagaactacaaaggcttgagtttgaagcaagcatgtcattaccaattgaattgtcatttttgacattctgaatggtagaactattcaaaaacctatcagatatcgccacctcaccttcagaaataactgtggtagaggcagcatgcatacttgactttggagaatctccacctgcactgatgagaatatttttacttttatttttctcttttctacttcttgaagtggtccgtacttttattttgccaatatccaatccttgagtatgatcctgatgacaagtggctagttaaaaaccatttaaatctttaacaagaaatatgaattagattaaagaaaaaagatttgcaaccatttttacagttgatgatgggaactccatagaaatctccttccccatatgaacagcaggaagttcactggatcccactaaatcagtcttctttttattatccactttacaatcaacgtcctgtaatatcatatggaacaaatcagaattgcaattggtagcattaacgggataaaattatttcagccatctctttaaataaagattagtaccttcactggattttcgcgtgaaatatcatccacagatgtctttgagacaggattttgccttttattattgcgattccgtcccttctttttacggttagaaacactgggcttttccttaggtttacctgatgaagacttgtcatgttcctctcctaatagttcaagttttgtgcagtcaagtgaaataaccatcagaaatcctcgcatttttcttaatatacaatcagatatcgtacagacagaacccaatgaactaaagaaaaggtttcctatgtcatattcactattaagacttgatgtaaccataatattaacatcgtgaagtactaataaagaattaaaggctctggctaaagcagcaggttttttacaaaaagtgactgatgaaataactgttccaaattccatatcagcaggaagaggggaaatgctacgttgagatggcacgggacgattgttttgcagtaatttatccactcccatactgtatagccaaatctcatcatcagaggaactacttgccacttccaaaacatcacgagtctgaaaacttatgaaaaataagtcagcctagtacctagagaaggccacaaaaatatattaacctagatcataacatgtaagaatatactaactgataacaaaccctgatattgaaaagtcataaaaacagaaagtataaaactgttcatcacatccaagatatgtattgcaaaggagctttaacatcttgatacttgatagcatggaagtaattagctggaataaaatgtggttggaccaattttcatccaatttgttacattatttagagattcatttataaatcttagaatattgtttaaaaaagagagagaaatgtgagtttttttggccttctaaatcattgtactcttctccttttacagatacttattacattaaattattcctacattttttactacagtcaatattgttttggataaaatacaaaatcctaattatcaaaagctatataaaataaaattccaaaagacaattctaagttttccctactatgaaacaagtccaattcaaaaatgaaggcataagtgattattatgtggacctcttctattcctccaatcccctttcctcctaacaagtcggcaatccctccccacccaaaaatgaaaaactatcttatatagcctcaaataactataaagttaagaatgtactttataacgaacatcatcattagcagtaaacacccccagtgcattcattaatgttcacacatcaattaagcttaaaacgaaagaaaaaggaagtagctctgtgatcccaaaagccaaaaccatgggtgcacatatcaaagttcactaaaaatgagttttacattgaatctcctctttgacattccaaaattttccttttaaggaatgaaacaatcttgtagaaccataattattttctgatataattgtcaaagaatgaatggttgcatattactttgaatgatttgtcacttttttagattttactcatagtatacagtggaaaaaaaaattgcactccctcaccactttcccaaacttgttcaggtagccaaatttgggcaaatataacaatatagttggtccaattaagtcaacagttataattgtaagcacgacacaccacaacaaaatgaatccatgttgaacaatcctaatggatttgctaatcattgccctaggggcaaagattacagaatttttcttcccataaattacaatatatgcattagtaacattcataacattaaatgttaccctcttcaataaaagcattccaattctttaatcactggctaacatcatcgatgttttccaactatcaacttttattaactatcccaccaattccacaacttaggtagtgtttagtccagtttgttacagcttttcttctccttacaaggaaaagtttggtgaggaaaattttaaaaattgaggagcttaatttttataaaagaaaaaaaaatagcttttaaaaataagttccatatcctaacttctctcttcctctcattctcaactaatcaattgtagaacattgaaatggagcttttaagctaaaactgtaaaacaacattttactttatgtttaaagttcttatttttaaacttctaagttttacacattccctagaaatcttccatgaactataatttttcccagaatagaaataaattaaccagttatcactaacaaagcaattcacacatcacgctaacagttccataggttcccaggaaagtgccaacaaaatggaaataagttaagcagatatcactaactattcacacatcatactaacagttcgataagttcccagaaaagtaccaaggtttttgcagctttcatgaggaaggtggaaaagaccttcctcctggtcccagcatccaaattcccccaccaatccacacaccccttcttcctccaaaacacattcaccccaacacccgcagcactcatcttctccttcaatttcacaccccttttcctccctccacagcaattcaaccacgccaacctcatcgaaacctcgatcctattcgcaataaacgcctcaattccatagtatcccttcgatttcagccaatgcaactccacccagtcctcgccgagctcggcctcctccccgcggaggaacccgccaccggagatccggtccatggcctccacgaaccagtccacgtccccaacgaagccctcggcaagggccagcgcgtcgagccgcctggccgagggcagcgaggacgtggcaatggcggcctcctcgccctcgcgcgactcgaacaggcgggaggactcaaagacggcccgcccggcggcgtccgaatcagcgacgcgggcaaggaggccgcgggacttcttgaagcagagtgtggggaggttgtcgtgcgagggcaggtcggggaggaggatgaaggagccgtggccgttagatcggagcttcgcgagcatctggagaaggatctgaacgaaattcgcatccacgattgttaaatgagcctggcggtggtgaatggagagagaagaaaaccatttcaaaatggaggatcgagggttagggttagggttggggttagggtttggggattgggaatggtagagtgagatgtgcgaggtgagggtgtcgatgagttggtggtgagccatgggaacgagtttagggattgtttggtttttggtttttggtttttgttttcgttttccgtgttttgcttcagcaggttgcaggtataatcatggtgtgagggaaaagagaatggctaaagggaggaatctacgctggatatttttatttttatttttgggttgtttttatgtgtttgtttgtttggccgtgtttggatagaacggtaaagggaaaggagaaagtgaaactgaaacgaggaatatatgaccttaatgagaccatcttccttgttttccgttcttctgtcggcactgttcttatttatacacgttattttttcttacaataacttttgtttttgtctttctaacccgtgttataggtgatttttttttaaagaaattaaaaaaatatatttattataaaataatagcaaaacataaaaatttatagacaatataattttatatattcaaataaaaatatttatttgtttacttctttaatcaatactaagaatatagattattatttgtcttctttttttaagatttttttaatatttttaggttaaaatatgttgataatttttaataaatattcgaattattgaatttgatgttgcttcttgatataaaaaattatttattattagtctctcttaaaaatatttataataaataaaaattatcaaataacaaatataaaatttactattttattttggactaaagtataaaaattaaaaataaaattattattttattaaaattaattaaaattattaaaaaataaacaaaatttaaatattcattagaattaaaaatatattttaaaaggtttttttataccacaaatttaacgttatgctctcttttgtttttttactaatttaacgttactgacagttgtttatagtctatagactactaatgtgtttggttgcgaattaaagcaaatattttaaaaatcagtcacatgtctaagcattaaaaaataaataattgaacagtagtaggtttttattaattaattgaacaacagttgaattggtgttaataaaacaataatgaaaatattttttaatcatcgtaattaattaagatatttagtttctcattgaaattttaaggtattttatataagttttggttggacttttataagtgcaatcctttggatcgagagaaaggatccagagagataaattacataagacatctcattcctttttaagcatgtattttatatgataataaacaaattactatctttttaataagcttaataaatttaatatgtgttgtcaattaaattatatttattaataaatagattttaaataacacataaaataatattaaaaatttaataacataaataaatttataatactaaaataatgtttttcgatcaaaattatataagaagatcgagaatctaggaataaataaatttataatactaaaataatgtttttccaccaaaattatataagaagagaatctaggaatactcgatcaagattcaaacgtgtaaccatacatgttttaatatatttttaatatttagtattatatagttactatattaatattatatcattaaaaaattatatgtacataaagccaatccttatgtttacttatgcattaaaaaaatttcacaagtcaaatttagcttccaacgccctataatagaaattcaacatccaacgtattgtgttttgtttggttcaaaagataaagaaaattttcacttaaatttatatttatactaagttttctttcatccaatagaaaggtgtatacatatgctctaatcaatgatgactcaaaagtttcatttgtcctatgttcttgacatcttttgaaattgtctaattattttgaatttcaagtatctattataaggtagattgagcacatccctaaagaatatgttttattgcgagttattttcgtaaaagtaatagaaattaacaaagtaaatgttgttcacaaattaaggaatgtacctttgtgtttctctctcttcaccaaaagcatatacgtcaaaagtagcatgtgttgtatctcctaataggaaaaatatcaacgagcactcattttcaaaatggtcaccttttcaatgaaacctatataccaagattattaaagctttgaagaataacaaatcaactaagtttcaatccaagctattggacaatactctacaacaaaaaactcaatcatttgcttaattggcaaagctatttgttttatgttataaatgtttatcttcattttgtaagttgatttctttgtaaatctttcaaatattattgttttcagaaagttgaaaatgactttgtgacaatgagtacttatttgagtcaatagtctttgggagagagattattgttatgtaaaaaatggtctaaaaaatacttgttataagtcaaaagtgattggagaataagacttatttgtattcaattattgattagtggaatccttcttaggttcaaggagaactagacataaacttaggaattaatataaaaataattattcttgtcatgatacttttatctttttctcgtgttttaatctttgcatgagtcatttgcgaacttggtttgtaacttatatatatttgtaaaaagatttcaaagaaatttctaagttacacatacacattactaaacctcccttctagtatgtttcacttattgcacgggacaacgctgaacttactaagtaaacacactccatgatttcatctctccaacaattatattagtataataaaaataaaacctaacattgcttgggattcattgagttgggagtcgatgactaagatgggggagtcagagaagtcccctaccgtgaaaaacatatttgtagacattagatgtattaatttttaaaatgagtgacaaatatttatgtaggtaacatattataaaagttaacttatatacactttaaaaaaataatcaattccacgtggaggagaaaggtccacaactatgagttcctctaattattataaaaattgatatatcatctaatgtctataaatattttcccatggtagtgttgggacttctctagttcccctacacttgccagcgtctgagttgggattcatttcatttttaccctagctaattgcccattgactctttctagtctctttagtcggaacacaacccaactcaagtgctgcttttgcttctctcttgtctcatctgtaataccttgctagttattttttttatataaatatgaataattgttgtgaaaatatatttaaataattaaataaatagtaatttgagaatatcagtataatatcaaaagtgggttttcataattttatttatatatattgtacagagcattgttgtaggagaaatgatattgcattggctccgaaaattagagactgaattatcctctaagagaattaaagctggcataattgtctctgatttgcaattaaaaaattaacaattaatatttagtctttttccggacttaccctttcgtatatagctacataaacataatcacgtcactgcgtgtcacacatcacaacaacatgcataccaattgaaacaaaatctccactcaacatcaacatcaacatcaacagcacctttaacccaaattaattggggtcggtggtagatgaacccaatgataaatcgaaaataaagcaaaagagagaaacagttaaaataaaagaatggtgagaggagaagagaaaagaagaagaaaagaattaaaacagggaacaactggagcatagaactactaaagggtttaaccctccatcagacttataacttttctccactccgtcctaagacatactgtccgccaatctaaatcccactccattaggtcttgtttaactacctttccccaggtaagttttggtcgacctctacctctctttgtatctagctcttggtaacatactcttgttctaacagaagcatctaatggttgtctcataacatgcccaaaccatctcaatctatgctctctcatcttttcacatactggtaccactgatacctttcgtcgaatatcctcatttcttatcttatccatcttcgtgtatccgcacatccaccttaacatcctcatttctgctacctctattttatgctcatgttgcctatgtgctggccagcattccgctccataaagcattgccggtctaacaactgttctatagaatttttcttttagtttaataggaatcttgcggtcacacaaaagccccgatgcactccgccatttcatccaccctgctttaattctatggcttacatcctcatcgatctccccacctttttgcaacattaatcccaaatatctaaaaacgtctttcttgggtacctcttgcccaagcagatgcactgtgttttgctcaccttctttaatcctcgaaaactcacacttcatatactccgtcttgctcctacttaccttgaatcctttagactccaaagtgcttctccacaattccaattttctattaacgccatctttggtctcatcaataagtactacatcatctgcaaagagcatgcaccacggcacttcttcttgaatatatttcgttagttcatccatcactaaggcaaagagataaggactaagagctgaaccttggtggacaccgaccgtgatagggaaataccttgatgttccattacaagctttcacacatgtgatagccccatcatacatatctttgattgcattaatatactttaatgctacctttttcttctaaagagtccaccataagactttccgtgggactctatcatatgctttctcgagatctatgaacaccatatgtaagtcttttttcctttctctatacctttccgtcaattgtctcatcaggaaaatagcttccatggtacatcttcctggcataaatccaaattgatttactgaaatcttggtctccctccttagacgatgttcgataactctctcccacaacttcatagtatggctcataagtttgatgcctctatagtttgaacaattttgaatatctcccttgtttttgtaaataggcacaagcatacttttcctccaagcatcaggcatcttgtttgtttgaagaatcctattaaaaagattggttaaccattttattgccacatctcccaatcccctccatacttcaatagggacatcatcaggtcctaacgctttattattcttcatcctctttaaagcctctttaacctcatatgtattaattctgcgcacaaatcttctattcagatcatcagaaacgtcctccaattccacctcactcttgtcaccatttccattaaaaagattgttaaagtagtgtaaccatctttcacttacatcttcatcccttaccaaaagtttttgattttcatccttgatacatctaacttgggtgagatctttactcttcttatctctcatctttgcaagtttataaatacctttttccccatctttgctcccaagatttttatacaaatcatcaaaaacttttcctctagcttctcgcactgctttctttgcatcttttctcgctactctaaatttttgcaaattctcctcatttggacatttatgcaaagatctaaagcattccttcttctgtttaatagccttttgcacctctccattccaccaccatgtttcctttgtaaaaactttgtttcctttgctttcacctaacaccctccttcccacattatgaacacatacaaccatcttattccaaatttcattagtttctccgataaactcccacggtccttcacgcaacatattttccataaattctaattgtttctcctcctttaacttccaccatcttatccttggattttgatccttcttcctcaaattaagaactttgttgaacctaacatctagaactaccaacttatgttgtgtcgccacacattctccaggatagaccttacagtcaatacatgaatttctatcttcccgtctagccataaagaaatcaatttgactgcgattttggccactatgatacgtgataagatgagactcccttttccgaaaaaaagtgttcgctagcatcaaatcataggctattgcaatgttcaagacatcttctctagtctcatttctcgtcccatacccaaaaccaccatgaattctatcaaaacctccattgtttttaccaacatgcccatttagatcgcctcctaggaaaatcttctcttctcgtggtatccctcttagaacctcttccaagtcttcccaaaaatgggtcttttcatctgataataatcccacttgaggtgcatacacactgatgatatttacgataagatccccgactacaagcttaaccatcataatcctatcgcctttcctttttacatcaacgactttatctctgaaacttctatcgatcataattccaactccattgcggctcttgatattacctgtgtaccacaacttaaaacctgtgtcctccacttccttggccttttctccaacccacttagtttcttgcaagcaagcaacattcactttccttctgacaaaaacatctgataactccctcagtttacccgttaatgttcctatgttccagcttcccaatttcattctaaacccctgggctgtgtttgcccgccacgctcgcccatctgcgtgttgggacccttgcccttttgtcaccaaattcgggtggagacctggcgccttgcctttcggcatggaccctagcatctttttcactacatcccggggtcgatgtagcaccttgccttgtggcgaggaccctagctcttttttcgatacatccggggtccgatgtaacgcgtcgctatgaagggaacgccccaacgaaatatcataaaggttcatcacataagaatagctaactttttatggccggttcgcaactcctgacgccaaccctcctcctttatcctggcttgggacaggccatgcatgcatacacacataggcggagttaaacaaaatctccactatttgaaaaaattctccattgtatgctttggctttcggcttctgaatcacctttcagcaatcaaaggaaggatcgtaatgaaagtttgggacatcgtagaagaagttgttggattctctgcaaagctgagtgaaggtgttgaagaaatttcaaaaggaggcgttatcagtgacaacgtgaaccaaacccaatgcatcctccattcattccatacacaactcatgttggaatgacattagccatgggtctaggttacacaagaacccaaatcaattaggccttttacgtttcttgtgatttggacaagttgtgaatagcttgaagcaattggattctatgctgaattgtttattatgatgaattgagttttccctcttatatatgtgtttttaatgattgggaacgttgtgacctatgatgcaattgtgtggatttttaactataatgtattgttttcgccttaaattggttttattagtgttaggattgtcttttgaacctttaaggtatgtttttgtgtgtttggaatgctttgggaagccctaggttatgcagaaaacttgttatgaagttctatttgttgtaaatttgcctagtgatctcaatatccaatgactttgtgtccatgtttaatgatgctaccaccagtgactctaatcacccaatgactattttagaatcaaacatccaattaatgcttctattgttcaaagtattaatgctttcagttgttgaaattgtccacccaatgactattttagaatcaaacatccaattaatgcttctattgttcaaaatattaatgctttcagttgttgaaattgtccaatagttattccaaagtgttcaatgacaatagtgtaacttacatgataaataattgagtcaaattagcgaatttttttttgggtctgtaataaataattatttaatataaaaagtttgagaatgcaatttaagttttagaataaatagtgacaagttttaaaataatttagcaatttttgtcttgtgttatttttaattgattttgacagtttttaaattgccaaaaaatgtaatttaagttttaaaataaatagtgacaatttttgagccaccataaatctcatttttaaatttgtaactaacatgttattactttaagtgatgataatgatttaaaatattttttttaatatatcaacaattcaatgctaattttatttattagaaaaccaaaataaaatttgttaatttatcatgaatctaaatgatatttaaaccacctcttaaatagcataatttatcaccaagtcaagtcaacgtaactttctctttctttcaccaaatcaccattaagatacaacacaaaaataatgtattttattagtgtctttatgtgtaatataatttaaatttgttttttaacaaataaatcaaatgaaaatgttcacacctttaaaaaataatctgatatcaaactattttttaaaagtatggacatcctcatttcccgatacatattgtttatattgctctctctattaatgcatagatttattcttctctgttttcttatacatttctcacaccaataatagagtgtgttaaaaaagttttttattagcacttaatattttaataatcaaatacatgtacattgcaacttacaaatatagtagatttatctaatgccgcgtgcatgcatactcactatttcattgagtgtgaagttttaactcacctcatctgcaaactggccaaagccaggatgctacttataatagtttaatacttatttttttttatatatacagaaatgccacagttcaatactgaattgcataaaatgtagtaattttttcgatccaattttatgctttatgctttatttaacataaaatattttaaagggttgagatacatgcacaatcaataaaaagggttgagatttgtgcacttaaaaagtttagttaaacgtaggagatcaagatcccctaccaaagtgtccacttgaactgtaaccaacaaaaacgttaatgtcactattcaaaatcacgcgtatgatgtacataatgtctctatccaaggagtgggagtgctttaagtttgtatttctctcttgttttttttttcttatcttatgtcttttcttcacctaccaacttaaatattacgtatatgacgcacaaaaaatcatgggcacaattatctaaatttgtttattggacataatgcacaccattcctccaatatcgccgtttgacttctctctcttaactatttcaaaaataaatatctccaaataagcatctctacctagctcaatcttccattgattcccttaccctattcccatctaatcattagtttcatttcacaattcccatctcatggccatctcaaacaacaatcatcatgctcttctccttgtttcaccaggaattggtcacataatccctgccctagaacttgccaagcgtttagtcactcacaaaatcatttccaaactcaccttcttttatggttcaatcaaaacctctactccatcaaaagctgagacacaaattctccaatcagccataaaggaaaacctttttgatctaattcaactcccccctgttgatctcaacatccatgttagtcctcatgacaccctagaaaccaaaatagcaatcataatgcatgaaatcccactactttttatgtccacaatatccaccatgaacctcaacccaaccatgatcatcactgacttcttcttcagccaagttatacctctagccaaaaacctaaacctacccatatttgcttttgcaccaacaaatgcatggctcgttgcagttggtcttcacacccccactttggataaagaaatagaaggagaatatagcaatgaaagcaaaccgatctcaatcccaggttgcaaatccgttcacccccttgatttgtttgctatgttgcgtgacaggacacaaaggatctaccatgaatttgttggcacgtgtgaaggggcagcacttgctgatgggatctttgtgaacacgtttcatgagttggagcctaagacacttgaagcacttggcagtggacagattattaccaaggtgcccgtgtacccggttggccctatagtaagggatcaaagaagccctaatggtagcaatgagggaaaaataagtgatgtttttgagtggctggacaaacaagaagaagagtctgtggtgtatgtgtcacttgggagtggatacaaaatgacatttgtggaaattcaagagatggctttggggttggagctaagtggaaaaaaatttgtttggtctgtgcgcccacctgtcgccaaagctggctgtgacaactacctcacagcaggtgagttggcacagtgtcacattttcttcttcttttttttttttttatattataattaaggcagaaccacctaattatgcctatgttttttcaaacttgttagttgagtctcaaactctcaatatatatattaatatggtttatattatcatttaattatatgttatgcatctagatggcaaaataaatttaacttcttggtcatctagtttacttaatatatatatatatatatatatggacacacacggtaattcatatattattctattgtagaattaattagtttccttttttccttagattttgtttgggagagagattttagagaaaaagggagggaagaaaaaggtttaggtgatgacatctctttgtttaggagttttaatttttgagaaaaaagatttgaggatttttaaaactcctctaaaatcctccaaaccattaaaatcgttgttccacaatttgaggatttttagaaggaaaagtaataaaattactatcatatcccagctacaaattcaaaattacgttttatttgtaaaatatagagtgtattaattttagaagtaagaacaaaattgtaaaagtatcttattaactctccatttacctctcttttaatatatttttaactcttaaattaggaggaagaaatttctctcattttccttcctttccttcccctctctttcccttgaatttctttcctttccttcccctcctaactcccaaacaaaacctgaatgatatagaattgttgttttagagtgccatcgtggtaatttttatattgtgcttgagttttcatcatataattgtcaatttatatgttgaattgtaggttcacctcttggatatgtttaagttaggtttcttttgatatagatatagccctattagaaggtaaattttttgaaacgtgaaagaattagaattgttaaaataatcctatatgacaatttttaaattattatcaatgcaggtgaggaaggagatactggaattacccttgggtctaataatgaaccatcaaactcttttcctgatgcgttttaccgcatacaaaccaatggaattgtgatcacagattgggcaccacaattggatattttgaagcacccatctattggtggttttgtgtctcattgtggttggaactcaataatagagagtgtttcatgtggggtgccaataattggattgcctcgttttgcagagcaaatgatgaatgctacgatgctaatggaggaagttggcaatgcaattcgagtaaaggtgtcaccatctaccaacatggttggaagggaggagttatcgaaagcaataaggaagataatggataaggatgacaaagaagggtgtgtaatgagggaaagggctaaagagcttaagcacatagcagaaagagcttggtcacaggatggttcttcttattttgcactttcaaaaatcagtcaatcaaatggcaaatgataactcatttgggatagtcaaatacattctttggtaaaagaatagtaaaatatcattttggttttgaaagtgcaaggtcttatagattatttcctaaaaataaggtgattcaaaataagtagtgtctaaagtgttagataagtctcgaaatttaactaattattattactttagtccttaaatgtattttaatgttatcatttaagttaggtgactttttgaattttggattaaggtcattggcatatttaatttctctatcaagtttttttttctctttaaattttcttacacagtaatgtagtgttttgaacatttttaagcacctgaatggtattttatctgtaaaagcatttctattttagaataaacaagtaatatcattttgtttgagcttttataatttaaatgactaaggaagaaatttatgtagcttaattgatgttgctaataaaattccttccaaagagggacaatttcttttgtcaatattgcatgaaactattgaaactttaaaagaatttaacacaacttgtcttcatctgtagactgattgaatgaataacgcttattatcattttttttattttgtgaaagaaaggggcaaagcactccaaactcaataacctctataaaagttacattaaaagcatcaaccgacaaaaatcaccaggaggaaattctagtatacaatcctcaacatcttctaaatccaatttattcaaggtatctgtaattaacttgatttccttctctacgaatatgatgaaataacgcttaaacaaaaaacaaattaaattcgtagaatgaatgacctattatgcagcatatatataccaacatcccaacaacaaaaaaaaaaagaaacatattgacacaagaataattcgaatcacaatcacaattcgaaactcagataaaagcttaaaagactcacgctataatgattctctcaattacttacgtgcacaactaagattatatttggaatttcacaaaattaatcgaaaattagctgaaagttaaataactatctaattagtagctactaataactcgttgctgaaatatatcaaattaatttgttaaattataagtgcttgataaattatttgttgaaatgattgatttataaattcgggccatgagaacggtaccaaatcgagataaattctgaatattagatatgacctcaaaataaaaaaggtcaaggttggccaggatgaggaccgtaccctcctcattgggaggaattccaggttttggatataataattggcagagtttctcacaccaatgttggaaaaggtatgtatgtatacaggaaaaattacacaaatatgcaatggtaaataaaatcttttccacttaagtgaacctgtgagaagtgtaatatacggcaatccaaaaatccaagagtgcagaaaaataaagagataacaacaagaagaacaccaacaattttaacgtgaaaaacccccaatgtgagggacaaaaaaccacgggaccaagtccagaaaattcttcactatgtaaaatatcaaagagtacagcaaataatttctacaacagaacctcacaaataaatgcctactcactcttaaaatagtggaaatcaacaatgcaacaatattcaaatagagacccacaacaggataaaaatatcttctgccaaaatatgagagaaataaaattctgagtataccagatgaaagcccacaattttaggaacaattggctgaaatttcatccaaaacagaggacaaatgagtattcaaccaatatcgcaaagtgagcaaaactttttctttttctctccagcggcgcagaagaaaggtgaaaaacaaaaacaagcagcgatgcttcatgtagctccttttctcttatcttttttttttaataataaaagttgttgggctcacttgaggaggcccaccaacaaactccccctacgactcaagtggaggcaaatgtcaaaccggcaataaatcgaaaagcttcaaacttccactttggtagtgtctttgtcatcatatcagaactattatcatctgtatgaatcttttcaagttccagtaacttagaatttaaaatatcacatatccaatgatatcgcacatcaatatgtttagatctaccatggaatgtaggattcttgccaaggtgaatagcaccttgactatcacaaaataaaatatacctctgctgcttaaaactaagttcctgcacaaactttttcatccaaagcaactctttacatgcttcagtaatagcaatgaactcagtctcagttgtagacaatgcaacacatttttgcaacttagactgccaagccacagctccccctgcaaaggtaatcaaataaccagaagtagattttctagaatcaacatcctctgccaagtcagaatcagtgtaaccacaaagaataggctccccaattccaaaacacagtttcaaattagaagtaccacagagatatctcaacatccacttcacagctttccaatgctcaataccaggattggaaagaaaatgactaacaacaccaactgcatgggctatatcaggcctagtgcaaaccattgcatacatcaaacttcttactgcaaatcatagggaatagattgcatgtcttttttttctttatcactagaaggagcttgtctagtgctaagcctaaagtgtgaagctagagctgtacttaccacttaagctttatccatatgaaaacgttgaagtactttctcaatgtacttctcttgtgacaaccacaacttcttggcttctcgatcacgagtaatatgcatgccaagaatctgtcttgttggtcctaagtctttcattgcaaaagacttgctaagctcctttttcaacctgttaattctagacaaattatgaccaacaatcaacatgtcatcaacatataacaataaaatgataaaatcactatcagagaatttctgcacaaaaacgcaatgatctgaagtagtcttcttgaatctttgttggatcatgacagactcaaacttttgtaccactgcctcggggcttgtttcaacccatacaaactttttttcaacttgcagacataattctctttacctttcaccacaaagccttcaggttgctccatgtaaatttcttcttccaaatcaccatgaagaaaagcagttttcacatccatctgctcaacctctaagtcaagactggctgttaaaccaaaaacaactcggatggaagacattttaacaacaggagagaagatttcatcaaaatcaatgccctttttctgacgatagcctttgacaactaatctcactttgtatcgtggaacaaaattgttttctccagtctttaatctataaatccaccgattttgcaaagctttcatgtccttaggcaacttgaccaactcaaaagtatgattatcatacaaagacttcatctcatcctccattgctgcaatccattctttcctgtactcattttccatagcctcttcatagcactcaggttctcccccgtcagtgaggagcacatattcattagatgaataacgagtagaacgcaaatgctgtctagaagaccttctaaaaggaacatcagacttaacaaaatttccagcatcatcattatcaacattctcaactggatcatctggaatatgagtaggggcatcatcatgattgtcaaaatctgctacatcaggcatatctgtatcaggaactggatcaaaatcaactaaaccattagtacttaaagactttgatttctctgccttcccaatgtcttcaatggtttgatcctccataaaaacgacatcgcggcttctaacaagcttctttccaaccggatcataaaatctatagccaaattcatcatgaccataaccaatgaagatacattcctttgtcttgacatctaacttggacctctcatcttttggcacatgcacaaatgctttacagccaaaaacacgaagatggtcataggaaacatccttcacataccacactctgttaggaacatcagcatgcgtaacaccccggacgtgttatcattaataatatcataaacgcgctatcagcgttatctgaacgcagtgcggaagcgatagaatcgtttttcttgattacattatgcatggaatacaaaacacacatcaaacatcaataacaagcccctgagatccagttaacacaacatagaaaaataggcagatacaaaaccaaacttaaaagaacaggaggaaacataactcatgtacatcacataatctgtacatacaactcataattctaccacatctgtgattatacaacataaatatgtacagacaacgggtgtgcattcacaccctctacttatacagaatacaagacagagatcaaaagaaaagagactcttctagtcttcatctgcagcccatgaccacttcagcaccctcagctagggcctcatgccctgtggtaacttctccatctagaagtacctgaaaaccacaaaccccacacagggtgagacaaacgtctcaataagctcagggtcctaggagatcctcccttaccctagttcaccaccaagcacaaacacttataacaaaacatatttgggcctaggacatcatcctggccgtcacacattccccagctctctgggtactaactggatgctctcagcatcagaggtctctcacctcatactggctctcaagccttaccagacttgtctcacagagtcgagccgtaaccatggcatctccacatatactggctcttacagccatctcatagagatctcaccgaggtacctaatctaagtgtcaaccactggacacttctcataccagggaggcaccgcctcctgaaccatataaaccatgcatgaggactctcactcaggactttactcattcagatatgactcatctaagaggctttaggctctcatccccttgagaagccgtctcttagagatataacatatctgtctgttgcctggtctcaccaggactttcataaaacatgcctgggcaagaacatccataaataggcaatcacctccaggactttccacaacacgtgcctgaggagtcaatccacacaaggagcaccatccatcaggacttccatctcaactgcctggggagtcatccacaacgggagcaccgtcccacaggactaacaatcacatgcctaagagagatcatctcacaccggagacactcaatctcttaggacttccacagcactggcctgggaaaaccttccaggacttaatcacataattggcatgggaaaaccctccaggactttcaatatctctgcctaaggaggaacatccatgtagggcaatccatccttaggactttagtggagagcagtggcacctcccatggaatctcagttatcccagggagtcctcaaactcttcctctggctaggaaacctcatctagcccgatactagtccagtatcctataggttccagcaatgaccatctcctggtcttcatctcaatcatagaacactctcacagtgttcctcaatccaaaaggcccaaggcctcacacctgaagccacaggtgtccaaataccctcacaccatctcggtgtctagcctagggttcatcaaccttcatatatctagaatggtctgagtatcactccaagcaccgtccatctagcccctcaggctcacaaacacgtaattatcaaaactggccacactggcctttcattccatagcatgctgttgtgcgatttatgcgaataaatatacggcaagtgcaccgatcgttaacaagtaataaagtaggtaagtgagttatcgtctccacagggattggaatgagtttgcagtaattaaaacaattgtgattgaaacagaaaacagaaaattacgcagaagttgttgaatgattgtgttgattgaaagcgaaaattaaacaaaacagtaaatttaaacttaaaagattaccaatgagaattaattgcggtcagacacaatcccttatgagtattacctccttcaattgactgattattttaacttgaagtttacataagatagatctctcctatagttgtaaatactagataactagcaatctcaccctttaatttgatcgagaaccctaaccttctagcgattctgtcaaactaagaattcagagaacaaatcttatgggtttgtgttatgattactcgaagaataagtctttcctatattagttaacccctaatttcttagtgaatcaactctttaaactgaaattgtaacctaatgtcttagtgaaactaatcagtttaagcaatcaaagaacatattataactccgcacccatgcatccctatgtttaggcgaagaacaagtgttattcttaacaagtcagatgttataatcccaacgtgtccattgtgaattataactcccaatactcatttaaagtgatcaattctaaatgagataaagtataagcacataaaagaattaaagtaaacaaaacatatgcatttaataccagtcaatttacagagagaaactcataagatcatggcctttccacaatgaaatgattagctagccataggattcaagaacaccaaagcataagatgatttcatggttgtgcagaactttggcctcaaaatcttgagtcctagggtttgtaaatgactaaaaaagctctatatttttctttctctctgtcccagtatattctttttattcagaaacctcctatataaatagagtaatttaattacagtaactgaatcaaaccctttttcctaatttcgaaatatatatcttttaatacaggaaagaaaatcgcatccacgcgacccgcgcgcgattccacgctagtcgcgtggattggccgagaagatggcgcttgtcacgtgaattatggcgctttccgcgtggattggcagaagagaaatccttattccttaaggttgtggcgcgacacgcgtggctacagcgctcatcgcgtgatgtggcagagaagaaagtccttaatctttgaggttccggcgcgacatgcgtggagtttgacgcttcctacgtggtatcctcgggtcttccacgcgacccgcgcgagtaatggcgcgacacgcgtaacactccaggacttgcttcctttattatttgctctttaagtccctctttttggcctgcaaatgcttgaatgacattaaaattgcttgagacaattaaaaatactaaagataactaatttttgaactatttcctaactatttatttaaaatataacctaaaactaagctagaaataagatgtgtttgcaacacatcacatgcacattatatatataaacaaacatggcatgcagtcatcacccacttgggtggcaagcaagagaaagggctaatccccagaacgatgagcttacctggcaagtcgtgcctgcactttcagcctctgcaacgatggtctgctcctctgatacctcgtgtcaaaccctaacaaggcaaccaaacacatatcacagaccattcagacacataaacaatcattagctcatcagacagtcctcaactgtctctaagaaaggaacctcagtcctttctatcaacccaggtcctcgacctaaggtttctcaggctcatcctcagcaagcctatctatagacccttactagtctatctcagatcaaccatggcctcagagtccctctagactcaatccaagccatcaacaatgagctcaaagctcgcacaacccaaaacctcagggtttccatagggctcggacagtttatctcactcaaattcaagcttctctttatcactagttccagctcacaaacctcatctatactatctaatgagcaactttgtcaactactctaaggttcatactagtcaaatagtcaaccttttacctctgctcatacatactcagagccaaaatcaaacttcatcaataatgataattcaaggctctaacttcatcagagtaaccctctgaacacaaaactctacagagtccaagcctaataacgactctaacacctccaaaaacacctctcaagatactcaaaatacacccaaagacccaaacacagaaccaacggctaagactcgagtttcttacctctgtgcagctaagacacaccagggaatcactttccctaaggtagatcgctcaaacaaagcctccttcgcctccggttcttcgattccaagggctcccttaggaatctcgatctcgccgtttaccacctcttgtcgagaataaagctgggtcactagcttatcttgaggctctgaacactttctcagttgggtcagaggtgtttagatgagagatggagaagatatgaagcttctctgggcaacaatgattgttctctctcttcctctcttttccttctttttctctctctcttcctttctttctctcagcccaaatgggctatatataaagctagaacgcaggtcccgcacggttcgtgccacgtcccgcgccagaagtcagggtcttacagcatgaaaagcaacaacaagagacaagttaataacatgtgcaacagtacataaagcctcaccccagaaagaagctggtaactttgcttcagaaagcaaacatctggctttctccatcaatgtcctattcatcctttctgctaagccattgagttgaggagtcttgggggccgtcttctagtgtcgaatacccatctgtctgcagtattcatcaaaaggtccacaaaactcgccaccattatcagtgcgaatacattttagtttcttcgctgtttctctctcaaccaaaacctgaaactgtttaaaaacaccaagcacttggtctttattcttcaagacataaacccaaagctttctagaaaggtcatttataaaagtaacaaaatacagcccaccactgaaagtcttagtcctcataggaccacaaagatctaaatgtaccaactcaagtacctctgatttccgagagggaggatggctcttaaaagaaactctattttgttttccagccaaacaatgagcacatttttctaaccttgcacattttaaacctgtaagaagattcttcttggccaaacaattcagccccttctcactaatgtgactcagtctcttatgccataaatctgacgaactatcacagtcaacaacatttatagcatcaactaaaacagaagctttcatccaatacaaacctgaaaacttcttacctcgcgccacaatcaaggaacccttagtgagcttccactgtccaccaccaaaggtattaaaataacaatcatcatctagaacacttgtagaaatcagatgcaaacggatgtctggtgcgtgcctgacattcttcaaaatcaactttgttcctatgctggtttccaaacaaacagtaccaatgccaatcacctttgacgtatcgctattacccatcttcaacacaccaaaatcacctggagtataagatgagaaaaaaatccttcctaaaagtcacatgaaaactggcaccactgtcaacaacccaactagaatcatcacaagcaacactgatcacgttctcatcataaacaatcaaaagatctcatgcactagcagtggcaacactatcaccattctcatcatttctcttttcttgcttgcctttgttatcgttcttcagcttataacaaaacttttgaagatgaccttttttaccacaataattgcacttgtaagttttctgctcagaccttgatttgctactgcgcttgcttttacctctgtgacctccttcttgatccctgtttatacttttccccctgttttcagtgaccaaaacctctacctgtgaagaggatgcctgctaagtacgtcgtctgacttcttcattcaaaatagaagtttttacaaaatccatggtcacaataccaccaggagcagaactagtcaaagtaacacgaagattttcccaagaatcaggtagagtattaagcaaccaatgtcccaaaatttcatgatcaaattttacacccatgccagacaattgatcaaagcaaccttgaaaatcactcaggtgatcagaaatagaagtaccttccttatacctcaaattcatagcctgtttcagcaaaacacaatttgttgttcccagttttagaagcatacaaggtttcaagtttgtcccacaaggttctggcatttgaatcattagcaatatgatttaaaacattatcatctacccattgacgaataaaaccacaaaccatctcatgctcaaaagtccattcttcatcagatttattatcaggtttctgagcagcaaatacaggtaaatgtaattttttcacaaatagtaaatatttcatcttacctctccacttgtggtaattagttccattctgtaataccttgatttttaaacatgtgattaagcctagattaagctatgattaagagttagaatccagcattataatccttaaatgaaagcttgagagaaagagttgaaaaacagattcgaacaattggtgcgacccgcgtggggtatggcgctaaccgcatggaaggattaaacaagggcaatccttgcggccttctagcgctattagcgtggatatggcgctattagcgtggctgattcgaacctgtggcgctaccagcgtgggatatggcccgatcagcgcgggaagcttggatcaggccaatccttgtggccatttcacgctatccgggtgggtatggcactaatggcgcgggttattcgaactatggcgcgatcagcgcggcacctggcgcgaaccgcgtgggactttcggttcagttttataaatagctcatttggacgaaaatgagagagaaaagagaggaagagagagaacggccattgatgacttgtggagcttcatatcttctccatctttcatctaaacacctctgatccaactgagaaagtgttcagagcctcgagataagctagtgacccagctttattctcgacaagaggcggtaaatggcgagatcgagatttctaagggagtccttggaatcgaagaatcagaggcgaagaaggctttgattgagcgagctaccttagggaaagtgattccctggtgtgtctggactacacagaggtaagaaactcgagccttagccattgattctgtgtttgagtttttggttggctttgaataccttgagaggtgtttttggaggtgttagagccgttattaggcttggactctgtagagttttatgttcagagggttattttgataaagttagagccttgagtaatcattattgatgaagtttaattttggctctgagtatgtatgagcagaggtaaaaggctagttatatggctagtatgaaccttagagcagttgacaaagttgctcatgagatagtatagatgttgtttgtcatctggaatgggtgataatgagaagtttggaattgatcagtataaacagggataaactttgatcagagtcttagaagaggctctggagccttgtgtaggctgagttggatctttttgagggtctgagaatcacttgtgaagtgattgttatgagttatgtggaaggaattgtggtttcctttcgatataacggcttagaaccgttactaataccttgtgttttggttctgtaggacgtgagcttgatagtgctagtggtggtgaccacgaggccgagagagccggtattttccctagagcaggtaagctcttagttcttgtttgtgtgtcctttgctgtgttccaccattatgctggtatggtgatggttttgtgtaatgttatacatgtatatgtgaaaattgtgtattgtgactgattgctgaatgttatgctgtaccttgtgaaagggaaatggatgtacattgatatgtgatgcttgttgtatgagctgcaccctgagattgggtgattgatatggatggctatggttgtttagcttatgatctgcatgattgatagttgcatcctattgtagtaggatagaggacatgtgatcgagtaagtcccgatatgagatgttcctgtgatatagacgtagcctcctgaatggagatgttcctatatctacagacgtagcctcctcgggcaattgtattgaaataggatggagatgttcctgcgatatagatgtagcctcctggggagatgttcctatatcagcagatgtagtatccttgcaaagagatgttcccgttatatagatgtagcctccaagtggagatgttcctatatatacggatgtagcctctgatagatgcattgtgatcctgctatgagatgtttcctagtatatagatgtagcctcctggttggagatgttcctatatacatagatgtagcctcagcgggatagtgttggatatgatgaatggctgtatgccatgagtttagcctgattgtagtcaggtagatgtgcattgaatgtgcatgagtattgatgagtgattcactgattgtggtcagatgaacacatattgatgatgactgatttaatgatgctctgatgtttatttggattgttttgatatactattttcatgtatatgtgtatgaaagtgaaccaggggaaggaaataccttcaagggccctgagtttactgggattttatatctcaccccttgtgtggggcatatgttttgcaggtgaatcttcaggaggagctgatagatcccaaggcaagaagcctactgtgcagggatagctgtacggagaaaccttaggcatagatgacttgagcatgtggctctgatattttgtattttgcctttggtttattttgttgtaccctgtggggatgtatttgtacagttttgtacctaaacacggattaaatgtatattcaccatcatatatgtacagtgtatgatagtgacctttgataatgtcactcttagtttatgcttccgaactgcttaaactctgatgattatatgtgtgtttgctgtttatgcttggtaatgaccctgatgattgaggggacgttacacattcaaactaatcattctaccgtaattaggctccatcattcaatcaagcaaatttcccagaaaagtaaaccagctctgatgccagctgttgggaaaggtacgtatgcacaacggaaaaattacacaaatatgcagtgataaataaaacctttcccgcttgagtgaacctgtgaaaagcgtaatatacggcaatccaaaaatccaagagtgcagaaaaataaagagataacagcaagaaaaacaccaacaattttaacgtggaaaacccctaatgtgagggacaaaaaatcacgggaccaagtccagaaaattctccactatgtaaatatcaaagagtacaacaaagagtttctacaacagaacctcacaaataaatgcttactcactcttaaaatagtagaaatcaacaatgcaacaatattcaaatagagatccacaacagggtaaaaaaatcttctgccaaaatatgagagaaataaaattctaaatataccagatgaaaacccataattttagaaacaattgactgaaatttcatctaaaacagagcacaaatgagtatccaaccaatatcgtaaagtgagcaaaactttttctttttttctccaacgacgcagaagaaaggtgaaaaacaaatacaagcagcgatacttcatgtagctccttttctgttatctttttttttttaataataaaagttgttgggctcactttaggaggcccaccaacaaccaatgacttcgtttttagcactttaactaattgttttcacctaaaaagtgttattttggtgcaggtaggacaagaggtttttctttttctttttttgaaaaagccttacaaggagttagaaatgcgctgcagagcctaaagcacaattgtgctaatcactaaacatggtcttgcttgacttcatgagatccaaccaatgagaaggaagtgcttagaagcacgacctcgcatgccttgaagcacgatcgggcatgccctggcgcagttgatgaagacccaacaggcctataaaaaagacatagcaacactattttttttttttaccttttgtttatttcgattttactttgtttgagtaagaccttctaagagggcaacgaattgagaatagttgaagaacacaattgatcaaaccttgtaaagattttcctccctttttattcattatgcttacttatgtgattgtatttccattgcctatggctagccatatcccctaagctaggattgtgacatatctatgaaccctaatccctctccattgcaatagaattatcctttattcattcattgtgttgttcgtttaaattgaaactgaggactccaaacctagctagttggtttactgtgagtgatctactgctcttaattagttgaactatacaacaattaaactcgtacgtatgaacaaacttgtgctggaatttctaatccgattaacaattgttaattaacttcttgtttgtaaaccttcttttaatttagaccctaaatgatcaacaaagaataaagtaaaagaagaggattactagaacgtggcctaattttgtttatcattttaagaggcaacattagtaattggaaggataattgtggtttaattgaaatagaaattaggaggaacataaggatatgtctaaaatcacaaccctaagtttctctatttgttaaaattctgatcaattctactagtttatgattaatttgcaacccaaactcaatttgataccttggcttatgttaaaaaaaataaaattgagaaccaccattagtctctaggatataatattggactttagatccattattactagtgcatgagatacacttgtccttaagcagtatttttagcatcattgacaaaagttaaatgacagaaaaagacaggtttatatggcattttaatattattttactgataaaaatatattttggggtatttatatataattcaagttgttaattagttttaaattcttgttattttttatttatatatcaattattttaattatattttttacttttaattaacttatttttttcatgttgtgtatgattaaaataaacaatgcaatataatattatgtaaacaataataatgaaaataaaataaaataatcttatcatctatttttatcaatatcttatgtaataacaagataaaaataagaaattcatatattatgtaaggaaatgtgacaaagatcaggaaagaacgatgacctaagaggaaggaatcctcaattggagaaaaaaacctaggaatggaagagctcatcaaggggacaatcccatggttgggctaggaatactgttaaaaatcagatactcataaattggaataataatttctctttcattcattcacttcattctcttctatattttccctcaatatgaggttcttatataagagagaaaaattcaacaaaatgctaataatactagataataacaaactgaacaaactataacaacctaacaaatcttaacaataatatgaaatttaaatatacaattcaacactccccctcaagttggtgcatgaatatcggtcatgtccaacttgccaattgcttcttcaaacacttccaggaatgactttgatcagcaataggttcaagaggtgcttcaggatagtccacgtgcttcagttatgaggtagaaagaaaattgaaatacgagaagagattccacgtgcttcggttatgtgaggtagaaagaaaattgaaatacgagaagagattcggaactgttcatgtcaataaacttcagggatggtctatgaagattcagaacaatgcaactgacttcacatcaatgaccttcaaatagaatacgtgcaggaagacttcaatactgaggtacgagaaggattcaaaatggatttatgttatgccgtttgtgttgttttggggaagaaattaagatacggtaaggattcaagtcgggaccaaagatgcaaaggttatgtgagacaaagattgagtttatgatgataataatcataatttgtagaggaatcggagaaggtgaaggttaaggaggaggtagatgattgggtatttcagaatcagaatcggccatcaaagaagggagttaggaatttgagagaaataaaagtggaatacgagaagataaaaagaaatgtacgtttgggaatgtgaagaagaatacatttggatatggaatggggaagaaaaaagactttagtggcagaagataattttgttcatggaggataacctgaccctcattcatgaaggaaatcatgactcttgttcatggaggaaactatggttctgataccatgttaaaaatcagatactcataaattggaataataatttctctttcattcattcacttcattctcttctatattttccctcaatatgaggttcttatataagagagagaaattcaacaaaatgctaataatactagataataacaaactgaacaaactataacaatctaacaaatcctaacaataatatgaaatttaaatatacaattcaacaaataccaataaggggatgagtaaagagaccaagcgagcatttagattgagatgatcatcgacacattataagatggtgtactaacataagcttgaaacctaattttaatttcattttatttaagtgtttttaaatcaaatttaattgcaataaaacagttggttaatttaatgctaattagaagcctggattttaatcctagaataggtttaactttaatttaagttataatttgggccttaagtttgcttggatcttctgcttatgtttcttaaaatcaggaccaacctccttgtgtgagtagctccttggaataaactaaatatatagagatgtaatcgcttttatttttagaggctgaataatgttgttttaatctcattgtgagtgtgagttgagcaatattgattcctctttttgttcttagatattaaaatcttcttgattcttatcaaaggtaattcaatacctttgtggaaaatccttggcctatcactctccatatattgtggtgctttctttctcatttcttgtatattctatcttttgcttttgctgtttatacttttcatccctttttccatctattccatcttttttattttacttattattttaattttcctgtcactttgttgcctggacaccgagccaaactcagttaaaccgtccaccgaccatcaagccatctgggtagacagcgtattggatggaattattatagttaaggatatggaacatgattttaagggcgtagatggaatccacatcagaggttgattggaaaacgaaccggaaaagagaaagatgataatgcatactcacgaagcttggcgtagaatgaatccacccgttactctctcatagtaatggttaagcattgaacaaattaagaagaaggggattggggtttctagacctcaatgtctctcttcttaacgcttttttttttttcttaaaattttttgattaaacaacaattaaattaaaaaaaaaatgatgtagaatgcattgtacaatataacttaaccacactcaatatgatgatctatttgttacattatcacttaacgaatattaatggtaaatactaaaatcgaaaaaaatatgttaaacacaaaaataagaaaatcactaatttaagtataaaaaaagaactaatttacagatataaaaaatatacttaaacctttatatattttatcatctcataattaagcacagatattgttagctcgtgatcattcagttcatatcttactggcaagcaaattatggttacaaatagctagctagtataggctagtagcttatgagaatgacagttcatagatttagaaaacagatatcagatatagacaactaattaactacaaatataaaatataaacaactagtcaactacaagtccaacaaatatgtgagatgtgggatttttttattaataaatttaaatcgaataaaaaataatctcatgagcaattagaaaataatatcatattaaaattttcactttttggcaatttgttgagttcagttttcacatgctattttcatgatatttattacgattttttgtttgaacataagttttcatgaacattgatgtaatgaaatttcatatcttgaattagaaaaaaaaatcgtgtcccaaattaacttaaaaacgattattattttggaatgagtaaaagtggctaaacataattaactgtggacctatggttaactttgtttaacaaagtggctaaaagtgttatgaaattatttattttaactatatatgtaaatatgattaattttttttacttgtaatgattaaatcaattatcgatatatgattaataatattaaaggttattaaaatgtttaaataagtgagttaatcatgttaatatgttattaaaatatctaatagaatttaaatacttgcaaaacaaaattaactatatttatacatgtaaataaccacacggactgtggacactagatgtaataattttttgaatgtacgaatgtcaatactcatcaaccgatccaaaccaatgtaaaccgcggtgaccgaaccgaaaaatcgaaaaccaaaataattgaaaatcaaaaaaccaaaaacaaaaaaaatcgaaaattttcaccggattggatcgatttttggattgaccggtgcaaaccgatccaattgtaaatcataccttactctttatctacttgagcctattccccatcatagcccaaaaaccaaaaatctaatacattgctccttattttgtccaatgaacttatttgtctaatgaaaattagaaaatgatgtttgtttttgtccaatgaatgtgtttgtttatgttagatactccttattttgataaaaataagtctcataagttttatttttaaactttttaaaaaaccaaaaaccgatccaatccaaaccaaaaaaaattggattgaattggatcagatttgtaaaaaatttcaaaccaaatggatgatcaaatgaccaaaccgaaggaattggatcgaatgattttttgtttcaaaaccgatccaatccagatcatgaacacccctaactaaaggctgttcacatgtatgtctatgatagaaaattacttatccgtataaccacctaataaaaattattgagtctttctaataataagtattcttaaaaaattgattaaataattaaaaaataaaatatttattgtaaagttcataaaaaattaaaaatgttatagataatataattttttatatattttttaattaaaaaaattattctttaaccaatactctaaaaacacatacagcttaacagttatcaaaattattaaattatttaccggatataatgctacttacttacccttccaagttccaatcattgactcaattattttctctcggacaatctcaacaataaatagctcaccaattaagcatctatctaccaatctcaagccttctattcccttaccctattcccattcaaccattagtttcattcacaattcccatctatctcatggccatttcaaacaataatcatcatgctcttctccttgtttcaccaggaatgggtcacataatccctgccctagaacttgccaagcgtttagtcactcacaaaatcatttccaaactcaccttcttttatggttcaatcaaaacctatactccctccaaagctgagacacaaattctccaatcagccataaaggaaaaactctttgaccttatccaactccccccaattgacctcactaacctacttggtccccatgcatccgtacaaaccaagatagcaaccataatgcatgaaacaccactactttttgtgtccacaatctccatcatgaacctcaacccaaccatgatcatcactgacttcttcttcagccaagttatacctctagtccaaaatctaaacctacccatttttgcttttgcaccaaccaatgcatggctccttgcacttgctctttacacccccactttggataaagaaatagaaggagaatatcgcaatgaaaacaaacctatctcaatcccaggttgcaaacccgtaaactcccatgatttgtacgatattttgagtgacaggacacataggttttaccatgaatttgttggggcatgtgaaggggcagcacttgctgatgggatctttgtgaacacgtttcatgagttggagcctaagacacttgaagcacttggtagtggacacataaccaaggtgccagtgtatcctgttgggccaatagtaagggaaagaagccgtaatggtactgatcatgagggaaagagaagtgatgttgttgagtggctgaacaaacaagaagaagagtctgtggtgtatgtgtcatttgggagtggatacacaatgtcatgtgaggaaatcaaagagatggctttggggttggagctgagtgggaaaaactttatttggtctttgcgcccatctttcaccaaagctggcactgataattacatcacaggaggtgagtagctaggtagggtctcctatgatatagtagaattttggtaagaaaattaaaaagagtaaatatttattataaaaattaataaaattttttattgttttagttttttaacaaatgttttaaaaatactgattaatatttgtcttcaaaataatatcatcgttgagttatgatttactccagtcataaattatcacacaataccgatagcaaatattttatcggtttcaaaataagtatagcatggataacaaattatttcaaaataagtgttacatttaaatttccaatataatattaattttttaataattgttgctttaattatttagtataatattaatattaagattaatgtaaaataatctatgatgatgtttattttggtatatagggagtatagttttttttatcaacttttttatgacaactttatctctgtttaatgcacatattatttgatattcttaattgtgtatgagggtattgttgaaaaaatagcctaaaaaatctaaaaagactgttattttgaaaggaaaaaaaaaactaaaaagactattattttggaatgggagaaatgttaatttggtcccttaattattttaaaattttcaattagttccctttattttcgaacactcatatcaggtactttaatttaaaaaaaaaaatactttaatcaacctttttttgttcagccgatgctattaaattgtcaattttgacgatttttgtttatgaatagacagttaaatatatttattattattattttataactataagtaaacttaaatatgttttaaattttttataaatgataaatttttgttcatatataattactctttttaaaattttgtttcaataaatttaatataatataaaatatatgcatttagtcatagatgccaaactatattcaacttggctgtaactcgtttaacctactaaaatgaatctggctggattatataattcaacctacctacttgtataatccaccaatccaataggtttaaaaaagtgggtcaagttaggttgatcttcagttaatttttattttattttctattgttagttataatatattttaccattaaaaacctttatcactagttaaatataaggatgttttaattcgctctgtggctataattcttttgcaagtcttgtattctctgattctaatgaattaaatatattagttccttttttcaatatagaattttagtttgagagaggagagtacatcgtagtgattttcagaacattgtgtttgagttttcatcatataattatcaatttatatgttgaattgtacgtaggataataaattatatagacacacactatgccttttattttatgtcaaatttaaaagaataatattcttattattatacggagtaatgtttttttatgttttattactagtgttattatagttcaatattccaataaaaaaacatatagtttggttccttcacaggtgaggaaggtgaagctggaactaccattgagtctaatcttgaaccatcgaactctttgcctgatgagttctaccgcattcaagccaatggaattgtgatcacagattgggccccacaattggatatcttgaggcacccatctgttggtgggtttgtgtctcactgtggatggaactcagtgatagaggctgtttcatgtggggtgccaataattggatgccctctttttgcagaccaaatgatgaatgctacaatgctaatggaggaagttggcaatgcaattcgagtagaggtgtcaccatctaccaacaaggctggaagtgaggagatagctaaagcaatcaggaagataatggataaggatgacaaagaagggtgtgtaatgagggaaagggctaaagagcttaagcacatagcagaaagagcttggtctcaggatggttcttcttatttagcactttcaaaaatcactcactcaaatggggtgtgataactcatttggggtggttaaaataagtactcactttggtaaaaggaatttctattctagaataaacaatcattatcactgttttgtttgaacttttatgcttttaatttgttggttgttttagattaatgctaacttctatttaatatttaaatggtgaaatattgtaatattaattgtggttgtaatttataaaataaaaaatttaagactgaattgatagttggaaaagagtttaaggattgaaagtgataattatgttttttttactgtactttcacgtgaatttttaggtcatattcatccatattatgttattttattagtagaattcacgttttggtgttagtttgtacgtataagatagatgtgcaagagctctagagtggaaaagatcgagtaaaaaaaaaattgcaatctaactctatcacattcatcatagctgtgtggtcacctgattacggtcatggtcattcgaccatggtcatgatcactcgaccatggtcatggtcacctccccatgattgagtgtcagatttcaacaaaattttcaccataatcgtggtaatttgattacggtcgtagtctgtctgtgttaataattatttaaattgagtttcgtaataaggtgttttgaagagaaacttttatcttttcctcttgagcatgtttttggagatttttatgggaaaagagagttgtaactttgtggctatgaaggagcattgaaatcacaacgagggtcgatttgtgtatagtttctttatctttttgttgtttctatgttttcccttaggttttctagttttactatgatcatgaacatgttaatgatcatctgtttgtgattgattgatatgaaaagtaatcattttcatacagcttgcatggtgaaactgattgtataaatcctcaatgaattaatttattaatcatccatttcatttaataaccttatcctttgaactaaattaatatttctataatcaattgaatattggtttaggccaaagagtattgttagaccaaaatcaaaggctaatagttgacttaggggaataatgcttattgacgataattgggattcattagaattagaatcggggaaaaagggatacatgcaaattcacaaatccttgacttttcataataattgttttctgacaagttcttctactttagttctttatttcgttaaagagtaattgatcctaaatctttctttatttgataaaactcaaattgtagttatttatgaaattagttatttgagaacgtgacggatcctctatgttcgatatctggattacataggatatacttttctttgtacaagtactttttttacgcatggaaaatagagaggtcgtggtttaaatctctcacaagcattttaacataaactagtgatcaatatttattgataataaataaataaatagagtaaataaaataaaatcctaagttggatgtggttgctcaataactctcaatctctcatatggacaagagctgaaaatgtgatgtccaagtacgttttatcattccaaatacatgaactcttgcacttattaatttatactctaacattagacaaagagatacatggacaatatatagagatcacaagtccctaacaatcattggaacggcaacaactattagaaaaaaattagaaaaccaaaacaataaatatagcagtagaattatttcacatgtaatcaatacataaacaatttttataacaatacttaatataaaaaataaatataataacaaaagagagtttaaaaaaaaaattaaagtgaagagcgttatgcgttgtctttaattagagagaaaatgtcctgatagtaaattataatgtgttcatctcctaatatacatcaactcgtcagaccaatcatgtacaacaaaggattttcgaaccaaataacacgatactccaaaatgcattttaaataatagtagaatttttatctattgtttgagttatatacatttttattgctttgtgtgttgtattttcacgtgtaccgaatcacaaaatttcctaacgttaagacttgtaatattcacaaaggaaattgatcaaataaaagagtttccttaaatataataatagaagtaggggtgttcgtggtctggattggatcggttttgaagtaaaaattcatccgattcaatccctatgatttggtcatttgattatccattcggtttgatttttttttttcaaatccgatccaatccaatccaatattttttcggtttggattggatcggttttcggttttttaaaatgtctaaaaataaaacttagagacttatttttatcaagtatctagcataaacaaacacattcattggataaaagcaaatacaattttctaattttcattggacaaacacgttcattcaacaaaataaagagtaatgaaaccttattgcaaacatgtttattggacaaaaacaaacacaattttctaattttcaaattgaactcataacttaaatgtaaaactaaaaagcctaagtaggtaattgatcgattggattggatcgatttttaccagtcaatccgaaaatcgatccaatctgatgaaaatttcatgtttttttcggttttcggttttcggttttcggttatttcggttatcggttcggtcacctcggtttgaatcggtttggatcggttgatgaacacccctaaatagaagtggtgggatgcttttagtttttcacggaaactaattctaaaagcattttatctttaaaaacataattaacaaataaaatacaatttaactttcaaattataagaaaatatttttggattaacagtcaattttgtctctgaatatatagagcactaacaaattcatcctcgaaagatgaaaattcaaattttagttctcgaaagaaaaaaaagtgcaacaaataactttcatctgttaacattaatgaaagtgtttatgtggcacattcagcgacgaatttgtcagcgctctacacatttagagacaaatttgtcaacgctctatccaaaatataatttaatctttatctttttcccttttttaatcgttgcaagtataatattataataaacacttaaaaaataggaaaacaaacataaattagaacaaacataataataagtataatattttggttaataaacataatatgtctgatgctatgaaatttccatattatgcttattaattaatcaatattatatttattattatgtttgttttaacttatgattgctttcctatttttttaagtatttattgtaatgttatacttgcaacgattaaaaaaaggaagatggagattaaattatactttgagtagaacgctcacaaattcgtccctaaacgtgtagaacgctgataaatttgtccttgaatgtgtcacgtaggctctttcattaacgataactgatgaaagttaatgaaaggataaatttgtcacacttttttcactttcgaatactaaaatttgaattttcatttttcggagacgaatttgttaaaactctacacatttagggataaaaacaattatttacccaaatattttccaacaacttgtacacaccatcgattatttctgcatattgctagacatgactccagaattggatcatcattaattgattatcggtatctttatatgtggacggaactcagtgcaagacttaagtttagttgcataattgattttggcgaaaactatggaaggaaagcgaaggaagccaccaaccactgagcataaccattgtccaattttctagtgcttaattaatgttaccgataaattccctaccaaagagggaaaatttcttttagcaactatcgaaggaaaatgaaggaagtcaccaaccactcagcggaaccatcactactagaaaaataggttttaacatcgctagtttaacatcggttatcgagcgaaccgatgttaacgaaaatgcggtggcaattttgtaaataagcgaacttatttaacatcggttttgaagatttttcgcaaaaccgatgttaaccatgaacttttaacatcggttttcattttttttagtacaaccgatgttaacgacgaaatgttaacatcggttttgtagattttttagtataaccgatgttaaccatgaaatgttaacatcggttttgtagatttttgagtataaccgatgttaaccatgaaatgttaacatcggttttttagatttttaagtataaccgatgttaaccatgaaatgttaacatcggttgtcaagattttaagcaaaaccgatgttaaaataacatgttaacatcggtttttgcatgggaaccgatgttgtacttataccgtcgcgaggattaaacttcagtatcgcgccttttagcctttatatcttctgaaaagccacgaccccttcgttctcgcgcctttatctccttcgacacccaactccttcgtgccccaactccttcatgccgtccggtatcacccgacaccccacccgacaccccatctcttcgtgccttctggtatcaccttccgcgcgcgctgtgaccattgcgcattgttggtgtcttcttgagtcgcgctcctagtatcctctgcttccaccgcctccgtctgataatcgcgacctcatcccaggctttcggtgtcaccggtgacattgacggcagtcggaaaggctcaggtacttgccctaacctcagcttgtagagtcttttggtctgttctgttcgaggtactatgggaactcacatttcgaactaataagtcgttggtatttggtttttatgttaccgccatggatttgcaaagtaggaggcgtcatttggttgagaccgcggttcgcattgttggtgttagctttcacaggtacttgactttattccatgcttgttggtcttggttattcatgtgaaagagacaatgggtatctgttgatgtatgtttgtttaaaaaatgttggataattgtatggacatctgctggaattggttttgtttggtgttaattgtttgtgctgctggacatttacactatgacaaacaagagaggaaaaggaaaaacactatacatgattggtggtttgttttggtttctgttgtggtttgttttgactatagcatattgatgtttaatttattgtcactgttattatactaagtgaagtttgtatggctggttaaaaattttaggacactaagtggctgattaagtaaacttgtgatgctattttttgtcgttgttaagaatacttgttaagtatttatgttgggaataattgggagctatgttaggctgatgatgttggttataacataagtagcagcactggtagagtctgttttagtcattgggttggtcaacctctctaatacaacgtagacaatccctcctctttgggagcttccctgtggcttagccaccgaggtagggtgtaagtccagtgattttctttctccattgctatctctgatattcgtttggtctcttcttctccaagagaacaccttcctgctgctgttctcttttgggtttttctgagtgtaggttaccccttcaccatttgagcctgacccatgttacgttatgtttagtgacatggggaaaaccaaaaataatggatcgaagaagggtaaagagacccaacttgcctgctctaatgttgcttcggatgggttagttgctggagaagtgtctatgggtgcggctgaaagctccaataagagtgcccaccaggtgtttgatagaaagactgaaagagatttggttgaagattcttcaaatagcgattcggtatcaagaaccttggggacaaaggacaccaattgtgaccagacaagtgagtttgaagagaaatctccgattgtggcagaagagaaaccttcctcgaaagataaggatttggcaaataacaacattccttgggtgaatctattcaaagagaatagacaaccttcgaaggggctgtgcttggaaaatttaaaccttggagaagctgagttaattgcgttagacagtgatgatgttcaatccttaaatgcagtctggggatactgtctcattgggtatgtggctggctgcttccctggtaagaaggctattcatgatgattccagtgacgaagaggagggcatgaggatgttggtgtgttgaggaacagtttaagaaaaccttattgatagctttgatccccaggtgtgaggaggccttcagtatcaagcatccattcctcattaggcttaaaaccttgattgtcatcaaacttctaaactttagtattttttatgaaaaccttattgatgtctgggatacatcgttaggtcatttcagttagcatgttgctttctattttctttaagaaaacatcatcttcagcagactcatcctgaatcttgcccttagtgcttcatcattcataatacggatacgaagtataagttttgcagaattgtcatcattaaatatacaagtcaaatcatcatcaaattcaatgttaatgttctctgcaatgtcagcgatactcaacttcttatccaccctcatttcacgattcagctttatgcgaagcaaccaaggtgaaattttttcacaagcaacttcttcatcaaccatttcatagtaggacttcacaaaatgaacgtcctcttcaattattgtacatcgggtctggatcataccacacctctgtagcttcagtcacactcctgagagtagtatattctaaagcacagacaaagaaggcgttttaattctctttgccacattaatgatttcccttaacctacgaacaccaagagtaacattctttgcactgacaccagcatagtgtaaagtcttgagagtcatatgagtaacaggttctccaattgattgtgctgccatacaaccaatcatttctccatatgctacaagggactgcaagaaccttgattctatttctcgcactacccactcaaatggctgacgataaagtctgtattcctccaatacccttttactgccaaaagggctacagagcagaatattgaacagaagagtagcattcttctgagcttcttgactcaagagatcttaagcaggaacaaccttaagtcgctcatggagcttttcaacggcttccacaatctccattggatgcatatcagaaggcctttggaagtcaaccttaaatgtcttctgagcattccagattactctcttcaggtgaacaggcagtggcagagaactgtcaccagtagtggctatgtcaaacacattatcatactctctgatggtttttaagtcttctacagcctcttcaagcatgtaagtaggcttccagttttcagcatcgaattcatacctaaacaccctgtcaaattctcttttttccattttaagggaatccaggttctatgtttcaatccaacagcatccataccatcttctccgtagagaaattgtatgacgtcaccagtagtagatgtctcagttgcaagttgaaatctatcagcttcaaccttttgaacttcagcctcaacacattatgaactctctgatggtttttaagtcttctacaggctcttgaagcatgtaagtaggcttcttgttttcagcatcgaattcatacctaaacaccctgtcaaattctatctttttccattttaagggaatccagcttctatgtttcaatccaaacagcttccataccatcttctccgtagagaaattgtatgatgtctcccaaagagtttctaactgtcccatcatatttaaccatgatgtcctccatagccttcacaagtcgcatctggatgtacgcagtttcagaggtcttcactgcagtatcaataagaccttccctaccacccatggcatggcaaaaaaaaactcttcaggggtcagtccctgtagatatgagttctccacaaagccacgacttgctggcccgtaatcatcttttgtgaagtggggcaatgtacggtctacgaaaccatatggaattcgcttaccctcaacgttttgttggcccacacaagcagtcatttgagatatgttgataaaacttcctttggaaccagctgtcaccattgctttcagattgttgctctcagataaacttgtttgagcactatttccagcaccatgacgaaactatctaatggtttttaggtcttatacagggtctttaagcatgtaagtaggcttccagttttcatcatcaaattcagacctaaacacccttgggaaattctaatttttttgtcatcctaagggaatactgcttctgtgtttgttgtccttttaatatgaatactcccctaaatatgacgaacatagcattagtttattgaatagcgcaacccttggcaatgaacgctcctataataatgtgttttgatccttatgattatataaatatatatggtaagtattttgggataatgttgatattgtcatcatgttgtttgcaggtttacaaaaagattctcggtgacttctttcagcattacattcattgaacctctgcatctcttccctgcgtaagaacaaaggcattttactataaaatattcaccacattgactaactttctacttctaatgcttgtattttgatttggctcagtcgcttgataggttcccattgtttttgctcattcccatactttgatttggcacagctgtctcaggtactatgattttaattgtctattacaaatgccttgcatctttttttatcttatgtatgtaaattgttttatgccattaatgactatgtctatatacaaataatgttcattatgagtgaaccgtagtttcccgtttgagattcattacagtgattcttccggaaagtttggattaatcattgtattgaatcttgaattgtccgtttggacagtttgggagggcttaaatttttttagtatattcacatttatacgttgtcattcttgtcttaaatatgacaaaatttcggttcaatgcatttcactttgttctccgggtgcatacttgactgtggtggaacccatgtcaccgctttcatttcgtgtacttggagaccaaagcgaaatgctgccgaaatttcgtcatattaaggataaagactcaacgtatagatatgaatatactttaaaaatatgccttcctgaatgggatagggccacaccttgaattaaaaaagtgaggttttcatgcatggctgaactttgtcagtatctcagagttggtaagcacatggatcgatcttggatgaatgcacctcgcatcacggttgagtacaaacaaggagttgaaaatttcttacaatttgcctccgaaagagctcgacccgatggggatggaaactattttgcccctgtatcaattgtttgaatggtagacggcaaacactagaagacatacgggaccatcttctgtgcgatggaattaagaagacttatacgacatggacatggcatggtgagtcgacagtgacgcagagggtctcgcatactgaatgggttgatgttgacatcggcgatcgactagaggatatgatccgtgatctggggcatgagtcttttcagcaagcacatgcccctatgtatgacacgttggagagtgattcgaaaaagccgttgtatccggggtgcaaggagtcgttgacactgttgtctgcagtgttaaatctagtgaatgtgaaggcgaaatatgggtggagtgacaaaagcttcagctcactgcttgaggtagttaaggacatgcttccagaggaaaacaccctgcctagcagttactataaggcgaagaagatactttgtccgatgggtatggagtataagaaaattcatgcatgtcctaatgactgcattttgtaccgaaatgaatttgaacaaatgcataaatgccccacgtgtggggtatcacgatacaaagtgaaggatgttgacgaatgtggcagtgatgacagttcagcgaaaggccctcccgcgaaggtgttgtggtatcttccgatcattccaaggtttaagcgtctgtttgctaatgaagatgacgcaaaagaccttacatggcatgcagagggaagaaactctgatgggatgctccgacatccggcagattcagttcagtggaaaaagtttgatcgtttgtatccggagttcggcaacgagccaagaaatctaaggcttgcacttgctagtgatggaatgaatctgtacggtagtttaagtactcagcacagttcgtggcctgttttgcttgtcatatacaacctgcctccttggttgtgcatgaagcgaaagtacataatattgtgtatgatgatatcaggcccaaaacagcctggaaatgacattgatgtttatctcagtcccttgattgaagacttgacaaacttgtgggatgagggggttgccgtgtttgatgggtatcgaaaggagacattcaagttgcgtggaatgctattttgtaccattaatgattttcctgcctacggcaatttgagtggatacagtgttaagggccatcatgcatgtcctatctgtgagcaagacacgagttacttgcaactaaaacatggaagaaaaacagtttacactcgccatcggcgttttttgagaccttatcatccttatcggcgattgaaaaaagcatttgatggaagtcaagagcatggacttgcaccgattccgttaaccggtgagcaggttcttgagcgggttgatgccatccatattgtatttggaaaaaggcaaaagaagcagaaaggtattacatgcttatggaagaagaggtccatattgtttgagcttccatactggtctgatctagatgttagacattgcctcgatgttatgcatgtggagaaaaacgtgtgtgacagtgtcatcggcacgttgcttaacattcaagggaagacaaaggatggtttgaacactcgtcaagatcttgctgagatgggtatacgtcaacagttacatcccaggtccgatggtaaaaaaatttacttgcctccagcatgccacacattgtcaagaaaggagaagataagtttttgtcagtgtctacgacgagttaaagtgccacaaggatactattcaaatattaagagccttgtacagatgacggattttaaactagttggattgaagtctcatgattgccacgtcttgatgcaacaactgttagccgtggcgattcgagacattttgcctaagaatatcaggcatgctatcattcgcctgtgctttttcttcaatgccatttgttcaaaagtcgtggatcctgtaacgttagatgacttggaggaagaggcggcaattatcttgtgtcagttggagatgtactttcctccctcattttttgacataatggttcacttagttgttcatctggtgagggaaataaaaatatgtggaccagtttatttacggtggatgtacccgatcgagagatacatgaagatcttgaaagggtatacaaaaaacctacactgtcctgaagcatccatagttgaaaggtacatagcagaagaagcggttgaattttgttcagaatacctgcagaaagcaaagcctattggccttcctgagttgcgacatgaggacagagtgggaggaaagggtacacgagggctacatgttataacgccttcgttgcaggagttgaatcaagctcatttgtatgtcctgaataacagtaatgaagtgctgccatatattgttcgtcatgaagcactccttcatcaaagtaatccaagaatgacgaagaataggctgttgaaagcgcataacaagaatttcttgaattggtttaaaaatacaatatttcgtgatgaatctgcatctgaaacgctgaggaagttagcagatggcccaaaaagaaatgtgagaagttggcaagggtacgatatcaacaagtactccttctataccaaacaacaagatgaaaagtccaccatgcagaacagtggggttagtctaacagctgagtcacaacactttgctactgtccatgacaacaatccacgtttggcgtgcttgccttactttggagtcattaatgatatatgggagcttaattatgttagtttctctgtttgtgttttcaaatgcatgtgggttgatgtcaacggtggggtgcgaaccgaggatttaggatttactttggtagatcttaacaagctaggttatcaagatgaacctttcatcatggcagaacaagctaaacaagtcttttatgtacaagatccatgtgacgaaaggtggtcagtggtcctgaatggaaaaaccattggcattaatgttgacgaagacgagtcaaaccccgatacaactatcacacatttcgccacacaaacacctgacgtcaacagagaagacgaggttgacgatgtgtatgcaaatcgttatgatcatgatgaaggagaattaattaacatcagctcatgtaatttgttttgcttaagtattttggactttaacatactatttgttatttaacataacttgtcatttaactttacttatatgtattcttgttttttatttcaggatcatgaccacaccatccacctccgctgaggcaccacatcgtcctgctgaggcagcagcggttcagcctgagacaccacttgcagttcactcaggacctcctccaccagtggatcaggctgagacagaacatccagttcactcagcacctccacctcctccaccagtggcccaggctgagactacacctccagttcagtcagcacctccacctcctacatcaaagaggacgagaaaagcaacacggctgaggtcactggctactagaggtcctggtgtggagaggcccgttgtccatgttgatcctagcacagggaaggctgatgggcctcaggctaagagattgaggacatatcttggggtcgtggccagagacaaggtagatatcacccttcctaattggaaggaagtgccttcagtgcagaaggacttgatttgggaggacattcaggtatgaaaatttaaagtatttaaataaattgttattcatgtaagttggaaactaacttctttgtaatgcaggctgagtttgatatacctgaagcctcagacgaaaggataaagaagaagatacttcagacagtgggtgagcggtggaggcagttcaaatccgacttgacaaggaagtgggtcctcgcagaagggaacgtggacgttgccgacgctgtatgcgagaaatacggcatcagtcacgaacagtggacccaattctgtcagagtaggcgagcagcttcctgggaggttagtggttttacgccttttgataaccctatcttttttcataaccctgtattttttcatttatgtagtcatacagtattttatttgctaactttacctgtcaacctgttacaggatgtgagaaagaaggcccaggcaatccagaggcaaaacaccgcccctcacgtattgtcacgcgggggttacgagttgctcgagaagagattaatggaggaaaagcaaaagaagcaactagagggagcaactcgtgatgacagcacggagacgatcattcatcctccgtcccccgtgcgacgacacgtgaagtggaagctggctcgcacgaagaaaagcggcgacatgacttcggaggcggcacgccagattgctgagaggattgtaagtaaaacaatacaaatgacatagacatttagttgtttttcgtatcacaactaacaaatcaaaggatctactttacgaattgcaggattccctggaagagcagtccacccagggttcttttgtcgccagtggtcgtcaagatgtcctggctgctgccattggacgatcggagcaccctggacgtgtccgtggtgctggagttggtgtgaccatcacccagtacttcggacccgctgcatcatcctctcggaagtcgaggtcttcttccatggcgcctgaggacttggatcgcctgaaagacaacatcagggtcgagctggagcagtctatcactgatcgacttacacagtcgatcacagagagagttacccagcaggtgatgatgagtttcagccagctgcagtcccacatccagtctcaggcagccattcagcctccggaggtacagtcaggtcctcttggtgcgcgtgtcagcaccaagggaagctgtgtcgatccctcgggcaatgaccctgacacgggtgcatctgacaggcgtgggttgtatgtggatggcaatcctccccgccttgttgcccttggtagagttcatgagggatcgacgactgtgcacagcgtccctcttgaggatggtcaggtaaaggtgagtgttgaggaggttcgcgatccagacgctcccgtccctattcccactgacgaggttgtgttagtgggacaggcacttaacactttccttgcctggccgacacatcttgtacacaccattttgactcaggtttggttatttttccgtaatgtattctaatttacgaatgatttgtgacatatgaacttaacatgatcgctcacccttgtttgttaactgtgtaggataagcaagaaggcaagggacggtcgaaacctgtagataaggcggaacatgcttctgatcccttgtaccttctggctctgaccatccctgatctttttctcagacccttccaggtgccatgggacccgcatatgttcggggtagttaatgacaacttccccttgtacatcaagcacgaggatatttcggagatcatccatggtggtcagtgtctgagcctctccgttttacagttgtggatgttgtaagtctcttgcaattgactagcattatttggtgaattgttttatcttctaccataacttactttattttcactgcataatagccatatgaatcatttaagtctgcaatccgatcaccctgatgtctatggattcctcgagccacagtcgatacagagatctggccaatctcaatttctgatcgaggactatatgaagaaatggatgcagacttcacagaaaaaagtctaccttgcaccatatttgaatgggtaaccataaataagaatcacaatttattaatgtatgcagtatatataataaccttgttttttacaatgcagttcacattggcaactggttgttatatgtccgaaggccaatgtagtcgtctggttctgttcgttgcataacaggcccgataactaccttaaaggaattattaacaggtaggttataatttctaacacatttacgttatttcttgacttgacatctaacttcaacaatatgcatactttttttgtctttaatagtgctttgaagggtctggatgactctccagcaagtaaatcaaaggctacaacaaaatggattgcgcttaaagtaattcctatcctaaatcatggtttaattactcaattaatttttattaatgttcacggtatttggcatttaattttgactttgtttttcaatttagtgtaataagcaaccaggaagcactgagtgtggctattatgtcatgcattggatgcagacaatagtccagggagccttcactgatagctgggacatggtaattgataagtgccttaattcagtcaaaatcatgttttaaatgcacgcacttatcatatgattttatgagttttcattacaaattcaccctaaaccgagttaaattgctttaatcgggttcgtacttttaatctgttaaaatttggaagatttgtccaatcacatttcacattttttgctagatttcgtagattccgtgacttgccaaagcttccgtaaacaaaagaaggcccaaaagattacttaaagcaaaacagaggaggtgcaacaagcaaaacaggctgaggcccaacaaaaaataggcccaggtacatttaactcgcttaagcgagtaaaatacactagaattgctcgcttaagcgagtggcattcaacttggccacttgttttagtgcaaaacagctggaatcgcactcccggaaagctctgctcgcccaagcgaccaaaacaggcaaaaatcactcgcttaagcgagttaaggcggctggaagacatctataaataccccgggagccttcatttgaaagacacaacttacacaccttctctactctctctagtgttcctccctcgtccaggagccttatttgggccttggaatgcttagtttaagccttggtttcatccaagagcttattctaagcatggagatgtttctttagttattttttagtgaggttaggctaagggagagaaataggcgggagtgcggaagctctgcccaaaggagggatgatctctgctaaggggatgctcctcatgcttggctagtctctctctgaaggattggatgtaatcttcttgctctcaagtatgtcttttaaatattatttatgcttaagttcttgtctattccttattgatagatttattctgtgcttaatgcttgatgctacttgatcactagtttcatgaattaaggttcttaagtttaactggaaagtactcttaaaactggatctgaataaatttattatttacgttacgatcgctaggaatagggcgtaccgtttagattgcattaaagcacgcgattatgattcataatgcgggagtgtttattttatatgcgagggatcgatatttaataatactcttagaacttgattgcgaggaatcgattcaaggctaacatagtgtgcatcaataaggatagataaggcttattgcatgataatgttaattgaatactaaggggtaagaatgatgaaatccaatcctacgcttttcctcagctttctgtattttttataactttttgtagttcatagtttttagttaattttctcaaaacaaatgaaaccacgttcatctacttgtaaataactattcaattgattaatttatttggattaactgagtaagctcaagtccctgtggagacgatctttataaattttgaaacttacaacgacaaaacggtatgcttgccgagagtttttccccaacagtaattacttgtctaattcaaattgttttggtttacttgttcttgttttgtacttattattacatgttttgttctgtcatgtcatgcatgcagtttttcaatgatcaaagaccattggaagcggacaccatgaaggcaatcagactcgaatgggcgaaattttttcttaaaattagacaagatgtattagtagattagggggttcatttctatttttgaaaacaattgtatatatatatatatatatatatatatatattaaattttagcttcttcatgtacattgacacattacattggatttgttattggaataattattaaattgtgcactgctggttctggaatatttaaattgtgctgggtggttctggatatttaaatttgcaggttgaagaactgctaaaattaaaaaaacaaaccaaatattttttaaaaaaaaagcaacaacatcggttgccaacaaaaccgatgttaacatgtaaatcaacatcggtttggtaaagtaaaccgatgttgtttgatgataacaacatcggtttactttaccaaaccgatgttgttatcatcaaacaacatcggtttactttaccaaatcgatgttgttatcagaaaacaacatcggtttacgttaaaaaccgatgttgatttacatgttaacatcggttctacgataaaaccgatgttgtcaaaccatcgtttattcttttgagcgttttcatgtacgacatgtccacatcggttattgatggcaacccgatgtgcttaatgtttgttaacatcggtttgtagaaccgatgttaaattatcaactttcaacgtcgcctgattcaacatcggccaataaccgatgttgaatgtctcaaataaccgatgttgaaagctgtttttctagtagtgcattaattgtccaattttctggtggttcattaatgttgccaataaatttcctaccaaagacggaccatttcttttagcaacattgaatgaaactaggaatggcaaaataggttagtccatttggcccacgaagaaaagtggactagactgagattttgaacctacaacaactaaacgggccaggccaacccaaaccacaaaaatgtgggccaaaactgggaacgggctggactagcccactgggccaactattcttttttttaatttgagtgaaagactgagagatagagtcattagagtgacttaaggtcactagctattgcccccgtgagtccgtgactccctccccctccgtctcctcttgactcccccgctctcctcgtgacggtgactccccagtcggtccccccgctccgatcccttctgcctgcttcgctcccaactccgctcccctctcctcacttcactcttgtggccgtgactcctcactccactcctagctccgttttcagctccaggctccttcgtcctgaaggtgtcaccatctccttaaactcctttcagtcctttcaattttataaattttatataataattttacaaaccctaacccacaatggatctcgaaggttaaagatggccaacatcttttggaagacatgcttcaacttctctgcgaatatgtactcttctttcttcgattgctcgttgttactccaaaaccctctcttgtccaacctttgctttgtttattttaccccttttttgtatattaaatgggaatctgattatgcattttgttcccattgtctttagcctttgttcttctcaaggttttgttttccctttttctttggattttttttgggaaacaaaattcttaatgctctctttgcttcttaacttcgtattgtgtctggagattttttttctttcacagttttgtactttgttttccttcattcaggatgatgttttctaaattcaattgtaacctatgctcactgaacacatcattatctcattattaattattaaacatgaagtaattcaattacttttgttttagttctcgtgataggtttgtgtttgtcagttgtgcaccttgatgttattagaatgttttatactaacttgcatattcttttattttaattgaatttgtaacaaacgtttcattttttgaattttgctatacctcaggtaaaggagatccttattgaggagttcaatgtgcagcctgtcaataatccaataactatttgtggtgatattcatggtcaattccatgatctaatgaaacttttccaaattaggggtcatgtgcctgagacaaattatatttttatggtatttgctacactttatttttctattaattttgatgatttcatatgttttggaattctatattttcctaaatgcattgcagggatactttgttgatcgaggttacaatagtcttgaagttttcaccatccttttacttctaaaactaaaatctaggtatgctcttttaattcatgttcttgcatctgtcttgattctctacttgtttttgttgtctttgcatgtattgttaataagattatcacttggaattttgcctagctttggaggcgtttaagaagagttttgagagacttggtgaggttgagagtttcagaaaacacctaaatacttgcacggaaagatgaaaattcattgattcttgtgaatcttatgattacatagttagggatcatactttatgctgcttgtgttatgtcatactgcaactacattgccatttttgcattgtgcttgttgtcactttgtttggtctccttgccatttagaatcaattttttcgttttctcatgccaactgtgaaggagatgtttttctattaacttaattatgtttaaatcaaatttctttattctggtattaggttaaatcatataataaagctcaaatgaattttctacataacattgaatataagttgtgttctgaaggtaaaatgctcaccctctatcaatgatgacaatagaacacaactcaattagcaaagtcatagaacaaaattttgtcaattagtcttatgagagagtaacacaacaattagtttatagttaacacatttacaccatattattattacattgtctgtataaagaaggcttctcttgtgtgagacaagaaattttcttgaacatccaaagtctttcgacttgtttccattttttctgtgtagcagaataatattctataagggtgaaggtaatcatcaaattaacttcatgatgaagtcagaaaattcaagttaaataataaatgcagaagaaaatgattgtttgtgggtaactttcaaatattgccatctatagacacgagtgatatatttgtctcaaaattcagtttaaacttagagtttgatttccttcttttggcttgtgataacaagtaataacattaggtgcttgtattttttaaataattattttgtctttttttaaaaaaataatttattttttattttttaggtggactggcccactgatccactaactcaccttaaagtggggcaaactagcattttcagtccactttacaaaagtaggtcagtctggcccgacccatatttttggttggtttgggctagtcagacccgtttttggtgggctggcccactttaccaacactaaaagaaactaatcaaacttgtaaattgtatttgagaagcccattattttaagaaggaaagcccaaccaagcttgtaatttacactcttcattcctaaatttaagatattgttttgaaatattttttttgtcctttttaataagattttttttcttttgattttttattttttaccaaaatatcttaattattttagtttataaataaattctatatttttttttctctttctcaaatgtactacttctcattccatttgagactttcattctgaaattgtttcacgttaagggtcatgttggcaaattgtctagaattgttcaagtggattggcaccggtcacttgtgggttgggtcaagtgcaatctgaacggggcagccagggtgttgtccaaggttttctctagcatggtgtattttgtgaccataactccataagggataggtttagggttgttttgcttagagcttgggtatttcttcttctattgtagccaaaataacaaccatgatggctatcgagctggcccatggcaaaggatgacaaaagctatggttggaatgtgactcaactagtggcagagtctggtggagatcaataatgcctatgacactacctaaaaaataaaatttgcagttattgagtggcaatttttttaataattatatatacttaatataattaattagaattttaaaaaaaaattggcattacctaaaaataaaattctacttaaaatttgacatacactaaaaaattttaatgactccgctactagactcaatcttagaggtcaatgctttttctcagtcgagcgtactgataccttggaggcttcataatcgttggagaaattgtatatccatttttcgtctcatggattttgtggtctctatagttttcgagagggaaatcatagtgttgataaacttcagaagtgtactattgacgttcaagggttctctttgtgggattttgcccttcgttttattagtgtggacatttatcgctctaggctaggcaatcttagttaaagggctagataatgtttgtcatggtgggtttggtttggtccccctgttagttttgttcttaaataaatttgctgggtatgctacaaaggattattgatattgctttgggtgccaacataattgaaatactttgtattttgcattatcttgatgcttacatgttgatcttattatgtactctctatgtttgtatttaaaaaaactcgaatttaaagtgatgtttgttcttttttataagactcaatttataatgttttttgtattaattatttttagattataaatatttctcattaaaagaagaaagaaaatatattgataaaccattagaagagagaaaaatattaataacaatgatagtttaaaaaaagttgtaaactttccttaatctcggtcaattaagtaatcgggtcttatatataggaataaagggagtatttgagtgttcaagagtttggttttaaaatgtaaaacttcactactattactctcttcaatacttacataagtataagtagaaaaaactaatataattagtcccaataatatcatatcacgtcgctacatagactaaagtcccattttcatccctaaaataaagataaagatgctgcaatttgatccttgaaagatttttagaggcaaaataattcttaaaagttttctttgttgggcacattagtccttttgggaactacactttgccattaatacataactttgaagaactaattcaactaaatgcataattcttttaaggagtaaattgcctatagttatgttttgtttgtgattaatttgccaatataattgaatgagacagacaaattgataaacttgtctaatagataaaactttaattcaaggagtattttgcctccaaaaatcttttaggaacaaaattatcacctctttccctctcaactacataaattttctttgtttataaaacttgaatccgaaatcaataaacctagttctacttatacttgctttttattattattataaacacatttttgcataaaaaatagacacatagttttactaaaattatattgttcgattacattaaggaaataatatgatttaaaccaatttcaacaagtaaaaagatgcatcacaattttctttttcaaatatgtcaccctaaaaagtacatggacataaatatttattcaattttatttcttaaaaatcttcttcattttctttttatttctatatcccttttcctttctcatcacatcacacattttttcattataatttgaataacttgtgtttatcttgttaaaataacaaatattaagtcacaataataggtttattgtatttttttatcaccaaatgttaatttgttagttttgttataaatgtcagttgagagattcgaacttgcaacctctcccttttcccttctcccttccccaaccattgggcctactctctatattcttatatatcttctattttttggtccccttttaactagtgttattaaaattggatcgaccaaactgatttgaccaagaaccaatggcctagtcggtctgattggggaatcagatcaagcatgcaagtgacttgtttcagcccatatcaaactgttcgatttttcaaataatcggtgacccaatgtgttttggaaactcgagacaggttgtgcaaatggaaaaaaaaatcgaaggtgtcgtttcacactttctcagtttttagttttcacttctcttataatttctctcttcacgaacctaaacccacaccccacactctattcttccttagttcttcctaaacaatgtactcaccaccatcgttgtgttgtccctttgctcgacaatgctcgatttgtccgtctactcattgttgcgccatcttgttgcaatgttgccacttcatttaggtacttccttcgctgctcacactcacataactaaatcaaactacatcagactgtttgtgaatgtttgtaaatgttgcttttgtttattagtgcgtgtaaatgttgcttttttttgttgatgctatttgtgattgctttttaaaacttgtttatggacttgtgttgtctttttgtttatggacctgttttgtcaactttggagtatggatggacatcttttattaagaactttatttgctatttggaatattaagtacttaaaaattggaaatccaaatatggattgatcaagaaaattttgttatgttatgttatgttatgttatatatatatatatatatatatatatatacacctccgggccatatcgggtcaattagtaacccaccaatttgatctttgacccatcaacttagtgtcttgaccaggtcgatgatcggtttgattttcacaacactgcttttaaccatgggtcttgggctgctgcacctctggactaagagcaaagtcgaccctacatgctgtttacaaaggcttgtcgaaagaccttgcgactattgaagcaatacgtactaaggagggagccttcggtggggccacaaaggttttttcaagcacatagcctcaacccaaccatgatcatcattgacttcttcctaaaccaagttctccctttagttaagaagctaaaagttcccatgtttgttttttcaccaacaaacgcgtggcaccttgcacttgctcttcacaccccattttagataagcaaatacaaggagaaattaaacctatctcaatcccatgggttgcaaacctttacacatcaccatgatttgtttgatgtgtattgggaccggacacataggttgtaccatgaatttgttgccttgtgtgaggaggcagcattggctgatgggatcttttgtgaacacgtttaattagttggaacttaagaccctcgaagcacttggtagtggatagattattaccaaggtgcccgtgtacccggttgggcctatagaaagggatcaaagaagccctaatggtagcaatgagggaaagaaaagtgatgtttttaagtggccagacaagcaagaagaaaagtgtgtggtttttgtgtcacttgggagtggatacacaatgtcatgtgaggaaatcacaaactaatggaaagaccaacttaatctaagaggcattttaagatattaaaatgaaatattttaaacttaggaaatgaaattgaaatttaaaactcagaaaaggtcgcaaaattctcttttaattagcctttctttagtgttatatagggatggaaaaaaaattcttacctacaaacattcatggataaaatccatcatgtataaatgatggatactttaaatgagtatttgttattcatgagtatacgtatttttttactgactcattaatgggtatggtatggacatcataatacccacgtctttgagatattgtaattttatttttatttataatttatatttatttatacttaagagatacttattttatgtttaattatgttgtattaatgtttcttttttattcttgatttttcactcactagttttaatttatgttgaaaatcacttttttttattttttaaaatcagaagtattcatgggtatccatggatacttaacaatataaaaaaaaatcattggtatttttcaaaggatactcaacgggtaacggacatgaattttttccaacgaacggataacaaatagtccttattcatgttggatctgattcctagtgttataattcaatattacaataaactgttgaactcagggggagttgcttgaagcacaaagtatagattgattcaagaaggaaagttttgaactttcaacatgtcttgaagctttgaagattaatttgtgattgaatgtaaaaggaagaaacatttctggtgatccaagtacattgcattcatatcattcattaaaggaattaatttaaggaaaagagtttacatggctttgattaattgtctaaggttttgaattaaatcaagtgtttttggaaaaataatgttttctactggattaatcgattatgttaagaaaagaatcgattattttgttcttgatgctttctggaaaacttttcaagaacaatgtaatcgattacatatcggaataatcgattattttaccttagttctcttataaacaactttgatgaatagtttaatcgattaccaacatgttgtaatcgattacataggctaatcagaatatatcaccttcctgtcttaatcgattacaaagaatagtaatcgattacattacatgcctatactttataagttctactgatttaatcgattaccaaatatagttatcgattacatagttcaataaggtttctgaagctttctgatttaatcgattaccagaatccgtaatcgattacataatatatttcaaaatatgaaacttcctgtcttaatcgattacatgttagaataatcaattattttgtttgtagctcatacccagaaatgttttgaatgatttaatcgattacaggagcgtatgtaatcgattacatgaactaaataatcgattacaggagcgtatttaatcgattactaacagttagaaaatttattataaatagaacccttgctcagctgtttcaataacttgatctattcatattctgagcattctaagactttctaaacattcttttagtgattctctaggttcataaagttcttgctttcacaaaaacattcatgtgttgttaagtgtttttaaaagcaagaagttctttttcaaagcttacgggaagtgatgttctgagtttgtttttattatttaacctggtgtagtcattcatatgcatatcattcattgaatcatcagatgatttctttccttaaactttgtggttgtaattcttttgtgaatcttgtttttgatagtctattgtaattgagtttcttgcttgtaatctagagatagagtttctctaggggatttgctgagtagtgttctcagtgggttgtctctaagaatctaatagtgtttgagatttctgaactttatctagggttgataaagagagactttgtaataacttgtaagaactaaaaattgcaatagtgaaactccattctagtgttgagtggaagaaaactggatgtagcttcatagtgtttgaagtgaaccagtataaatctttgtgtgttgtttattttctttatattggttaaattctgttattcttgattgtgtgtttttgttatcaataaagttcttgagctattgcataccttgggttgagcattagattgaataaaggttcttggtttcaaaagtgataaagatccaaagggaaaaactctgattttgttcaacaaaatttttaaattaccaaacctaaccaattcactccccctcttggttaagtgtgaagtgttcccatattttacataaacacactgtgattatctgacgggtgaggtaagtgaaactagaactattcatgtctctaatcctaagcaatcaaattctttttcctgaggatttccaccacataaaaaccaatgggattgtgatcaaggattgggcaccacagttggatattctgaagcacccatctattggtggttttgtgtctcactgtggatggaactcaatgatagagtgtttcatgtggggtgccaataattggatggcctctttttgcagatcaaatgatgaatgctacgatgctcgaagaagaagttggtaatgcaatttgagttgaggtgtcaccatctaccatcatggttggaagggagtaattagcaaaagcaataaggaagataatggatacagaaggatgtgtaatgagggaaaaggataaagagctcaaacaaatagcaaaaagagcttggtctcataatggttcttctgatttagcacttgcaaaatcactcactcaaatggggtatgataacttatgtaggtagttaaaagtactctccttgggaaaataatttctattttaaaataatcagctattaagattttgtttgagcttttatgatttaaatttcttccttagtctctttgtttgtttacgataggaaggaaattaaaataattgtgtaactagattacatagtggttggtactgatatttaacaatttgtaagtttgttttagattaatgctaactatcaccattaaagaaagattagtactgctaactaacatctatttaactaatgattaaattggtaaatgtatataggattaatcgtgttaacaataaaatgaaatgaaatgtaatcctaagtttgatatgattgtccaagaactctagtttggacaggagctgaaaatgccacccacagtacctttatatcacttcaaatgtatggacccttaacattagataaaaagatatataagcacaagtccctccaatccctggttgcaaccatcaattatttgtttacaatattgctgaaaagaattccaaaaaatttatcatcaatatcttcagacgtggatggaactcagtactagagcaaaggatgaatgttgcgcactacgcttatactagcatctactcccatacaaatgagtcatacacaataaaaaggaacacttgagaaactatttcattcagttaattagtaaatctggttttgaatttcaccaaatgtatcatagatccatcgcacttttattcatcgaagtaaactaccaaatcactgagcacgataacttttgttagccaattttctagtgcttaatagattttgagaataaaatttcaccaaagaaggacaatttcttttagcaacattgcatgaaactattatgacttgtaatttaacacaacttgtcatcatgcatcaatagaattgaattaatgacttgtaaatgaaaaaataaataaataatctgtagaatgcattatgacctataatgtaacataccaacatccaaaaagaaaacattttgaaacaagagtccgatgtaagcattaatctataatttatgttcaataacaatcatatcaagaacatgaaaaggatcttgggaattcatgagttttacgtaaacatgcctttgtccataattgcggaagatcttttaatggtagaatactttcgtagagtctttgggaaagattatttaatggcataatactttctcagagtcttgaccctttcaattcttctatcttctttgatagaattggatacaactctcatgggcagacaatgatggtattcagttttctagatatgtatttatagaaactaaaccactacgattgagataactgcataatacccatactacatacatgatcaataaatgtcttgggtggtaatcccttcgtcaacataaaattagtgctaacatactctatagacactccatgtttctgaacctcttctttaactacaaagtatttcaatttcatatttttagctccttttgaatacttgtcgtttttagaaaagaagactactacggaattatcacaataaattttcagcggcctatcaatacagtcgatcaattcaagccctaaaataaagtttcgtagccatttagcctgaaccatgaccttaaagcatgccacaaatttagctttcatagtggatgcagtaattacaaactgcttcgcacttttccaaggttactagacctcctataagtaagaatgtgacctttagtgccttgcaaatatctcagaacattctttgtagctttccaatgatccataccaggattactctggtatctttccaacattccaactgcaaagctaatatctggtctcgtacaagtctgagcatacattaggctcccaacaagtgatgcatatggaattgcttccatttccttttgtttcaattcattcttagaacattgcatgagactaaacttgtctcctttctgaattggtactggagacgatgagtagttttgcattccaaatctctctaatactttattaacatatgctttctgagacaaactcaacaatcattgtgatctatcatggaatatttctatcccaacaacataggatgcctcacccatatctttcatttcaaatttactagagagaaacttcttagtctcatttaaaagattaggatcattagttgcaagcaagatatcatcaacatacagaatcagtaatgtaaacgtactcccactgaccttcagatatatacaccgatcaacaatgttttctttaaatccaaaggaaacaatgatatcattgaacttaaggtaccattgtcttgaagcttgtttaagtctgtatattgatttcttaagtttgcacaccatgtgctcttttccttttctatgaaccccattggttggtccatatacacatcttcctctaaattcccatttagaaaggcagttttcacatccatctggtgtaactctagatcataatgagtcattaatgccataatgattcttagagaatcctttcttgaaattggtgaaaatgtttctttatagtcaatgtcatctttttgactgaatctctttgcaactagtctagtattgtaccgttataagttaccatgagagtcatgtttggtcttaaagacccatttacatccaactcttttacatccttctggtaactacatatatcattatgagaatgcaactaccaatgcatgcatcatgaaatgaccaccactcctccggagtgtggtgtggcacacaagatgtgaaatcatccccaggaacactgaacttacctggtaaggtctcagtcagcaattccttcccaggtctgtggttcccgccaccaacagtctcacaatcaatgcctaaccaaggcataagcaatttcatatcaaaaccagaccacagacatgcaagtcacaatatatatcataacagaatcccctatcctagggttcaatcagagcaagcctgcactaggctcctcacagaccatacaaggtccgctatggctgcataccaaacatctgagtcatcacaactcaatgcagctcacctaacagagcataaactaatcacaacttcactattcaattgtcatcagaaaggggctgaggtccactcaaagccctgctctactagcctcttagctcagaacatcacaatcaaggctctagcttatcagagaaccatcaacaagtgactctacataagtcacacatgcatatatagagccaagattcaaagttatcagaataaaaaactgaaagctaatccttcatctactcagagccctgaacaactttctcaactggaccctgggctaattctagccccagctcatatgggtcactattcacagggacccccagaatcaaaattaaacggtgaaacttgaggatcttacctcaatgacgactccaaaagaccccaagacgtcttccttgagcttctgtgtcctaatcacaacgtgggtcttcgccaaactcaagtcctctgagttttctcgctgagaattctcttctcaaacaaagaggggttttcaaaagagcaattgaaggattatagttttcctaaagtttctctcacaatcaaaggtcctcaagatgtgtttgggctaacatctaaggtccctaaaagcttggaaagccatcaatggaggtttggaggcaagaggaagaagaaaggctgatttccccttcatttttcgcgttttggcctatatatactcggtctgcccgacatccggcgctaccagcgccaactccggtgccatcagcgccacataggtcagttaggctggcgctttgagcgccactcccgcgctcctggcgccggttttcagaaactgtggcgccctcagcgccactcccgcgcctccagcgccaacttccagagaatctggcgccttgagcgccacatctggcgcccccagcgctagcttccagagaccctggcgccctcaacgccaagtctggcgccaccagcgccggctagggatttggcgctcctggcgccaattctggcgcccttggcgtggacctgcagggattctggcgcttccagcgccaacctggcgctcttggcgccacgttctagaactcacagcgcccttagcgtgaatctggcgctcttggcgccaccttccagtggttctggcgccatcagcaccgcacccttaacaggattttctgattcgaatccccgcgcgccgaaaatgaaggtccttacatataccacataattattataaataacaaaccttctttccctttgagatcttcttaatgctatttgttgtggttcttctataatgggttcattcggttcattgccaataatttcatcatgagcaatgggatcattcatttgttgttcttcattattgttaattggttcaataacatgaggaacaacaactttactagagctacaagtcaaaggaatttttactcttacttcttgaattcccactttacgtggtgtttcactcctattaacttcaccatcttcaatgaacctagcattactagtttctataatccttgtggtatgattaggacaataaaatctatacccttttgacttttctggataaccaatgaaataaccactgattgttcttgaatccaacttcttttcttgtgggttgtagtatctaatttctgtctggtaaccccaaacatgcaagtgccttaagctaggtttccttcctgtccaaagttcaaaaggagtctatggaatgactttactaggaacgttatttaatacatacatggcagtctttagagcataagtccacaatgaaatgagtaaagaagaattacttaacatacttctaaccatgtccaacaaggttctattacgccttcttgatacaccattctgttgtggtgtacctagcattgtgtattgagcacaaataccatgcttttctaagaatttagcaaatgggcccggatgttgttcactttcatcatacctttcataatactcacgacccctatcagacctgtcaattttcacctttctgtctaattacctttcaacttcattaatgtaaatctctaaaacatttataacttgagacttatcatgtagcaaatagacataaccataacgtgaataatcatcaatgaaggtgataaaatatttctctttattgaaagagttaacatcaaaaggaccgcaaacatcagtgtgtataattttaagaagctgagtgcttcttgtggctcttttctttgtgtgttttgtttgtttacctttgatataattcacacaaacattcagatcagtaaaatctaaatctggaaggatttcattctttatcaatctttcaattctttctttggatatgtgtcccaaacgtttatgccacaagtaagtagaacattcattaattaaggtacgtttagtaccaatattatgatgcagagtcataagtctttcaacataaagattatcaagacataatttatataatccattacataaagtatcattgccaatcatatgattgtgcttgtacaagctgaaactaccactaccaaatttaaaagagtatccaactttatcaagtttggaaataaaactaaattcctagatatactaggtacataaagagcttcacataagtccaaatgatgttcactatcaagatcaaacggtaaatcccaacagcttctactggaactttcactctattacccataaggacaaacttttcatttgaccttgtggtttgggtcgtaaggaatctctttctttttagctccttgatgtttttcgtaattgatggaatgaattccctagttcttaattctagtttcctcttgaactaacatattgtgtaattcatgcacattctatttgtctttcatggtattatagttcatttggaaaggaccatactcagacgataatgagttcatatgaactgcaccagaaaattttcatccacatccattcccgattactttagtcttgctgcaatatttttcatttcaacaacatactcatgcatagtacgtgaaccatcaaatttcatggtggttagtgtactcattagtgtcccagcaagagactttctgtcagtagtttgagagcactcttccacaagttttagcgtttctttagtactttcagtttgtggaagagttgacttaatgttgcttgcaatgctcattcgcatgtacatcagactcaacctattggatatttcccagttcttaaaatggactcttcatccttagtgcttgcatcaacaatagcactaggtttctcttctctaagagctaaatccaaatccattaccccaaggtaaaattcaatttgttctttccattcagagaagtttagtccattgaaaactacaatagttgagaaatgcgaatgtgtagcaacaggtgctgcaagatataaaacttaaaaaaataatgctttgaatcatacatatcacatactaacataattcagagattcatacatcataaaatgcatactaatgttcacctttggggatccattaatacacaacattcaactataatgatgctaataagatttcacataatttgattatgatgcataccccaactaaaaatatttgtcatctttggacgtccaaataaaactagaagtgtatcaacattatcaacgttcatgtttatttattataaaacaagtaatcatcctttgggttgatccttaactgtcctataataatgaacttcaatatgccacaacataaacaataattttataccattcatagcatcacatacaattgaaatagaacatttaaaaaagaaaaagaaaaagaaaaaattgattatttaaatttgaagaagatgaagaaagttagggaataaggaggttaggaaagatgaatttataaatctttgatcattgtttgcatttttgtgacagtttttaacccccggaaattactcactctcatagtcatcaatggaacctgaacctacgttcgagacaaaaagtaacagatttcaatttttcgaggacacaaaaaagactcaaaattttgcagggacggattccaaacatttcgatatttatagggacgaaaacatattttagcctatagtttaagttttaaaaaatgtcacgtaggctcgaatttgtctaagtctgattccaggccaaaaaataacatatttcaattttttgaggacaaaaaacataccaaaaattttgtagagatggattccaaacttttcgatatttataaagaaaaaaacatattttaaccattaaaaaataatcaaattccttgtgatgcttaccattatgctaaacaaaagattgaaaggagattaccacatgcatccacttctagcaaaacctctttcaactttcttgtaagatattttttattaattacttgatgcttcagcagtaagctattatagatggtggattttgagaagcaatgatgtgacactaatttcataacttatgaggtctaaggtctattaataattattgagaagatggaaaaatatacttaggatattgagaagctttaggatattaattattgttgtgctatttaggagatgaaaaacataattaaagcaagttcatgtatgaaatcaactacttggattgtcattcagaatggaggttggagagggaagacatgacatgtttgcaatgcaggctatgtttttttgttattattattattgttgtatgttgttcagtttaacctttgtgcatgatttcatttttatcattgtatgtattgcttgtgtatttggagacatttttctattatttattgataatagtaaaattatttctttggtttagacaatttatgattttttccttgctttgaggaggtttttacattaaaaatatgtgtctattgtgagcttttgttttataattgtattgattataactttaaatttgtaatttgatatgtatatatgaagctaaaacttatagcatatagatcatgatgtatacaaaaaaaatacttataggtataaaatataggaagatgaattgtaaaatatgatgtcaatttttttttaaaaaaactaacattttagatcggttctaatgcaactgatatacaaaatcacattttgtgagttcttgtgacaacaccttaactacaaacactacacaatgagagcaaggtcacgacaatgagagggaacacacatgtgcctaagaatgaaatggaaattgataaatcacataaaactaaaacttaaatgtaacattttcctaagaatccaaaatttctaacatgaccctccttaggtatgcttcttaatttatccttatgctttctgcctcacattacttaagatatgttcaaattacactattctccccactctaactcctaagagattattatgtgtcacattttagcatttagtctattgtaataggaacatacttttttcctttttttccaactttcaacatcaattacatatttgaactcattatcaactttgtgcttggattgcttccatcactcacatttctcctaaggggatgaatattacaccttttgggataccttctaccaaggattctcatataaaggtgtttagaaacactttttaccgacttggctctacttggacccacttaaagtgttctggttaaggaagtttcttcttattagggtattcaagacaattttttttttaccttaccctatctatttgacacttctttcttgcaagttgctctttgaattgcatcaatatatagagttctaaagctatatgtttatggtcgttggaggtaggatttgaacttcaaattgttacatgagttgtccatgttcatgcaacttcctgctctgcaaaacacttaccctccaaatcttttgcaactcttcttgaactacttccttcaactctgctcttccccatcattataataatttgcacatttcaaatttgaattgtgtctgttgtgtgcttagttgtatggtcttagtagtttctcatgatctttgaatttgaatcatggatagttttttgaagattgatctacataatgtttttcttttaagatgctatgataaatgcaatacattgtgctatggtaaatgttagtgaaggagacacaaggttgagaattgcctatagaatgtgccactatgactgacttcactttcgcttcctcatttgcaaagaaggtatcaagctgagaattgtctacaagaggccctactctagcttcactcttgtttcactcaggatacctgaccgcgagtcaaatttcagtctagtatctcatgcaaactgacaaaaaaatagtgttacctcttaattcctatgtgtcaaaaattatctctaacatataaatagtttcaagataatttattttccaaaatcaccccttttagttaaaaaaaaaaaagtccaactttcaccacaatcgaacaccctttcaattttactttcattctttttcaatacactttcattttaacctcttacctttcagctatacctagcatggtgtaagactttggttttatttataccctcttagaagactttggtctctcgttcatgctctaattcaattaattgaaaatttcctccaacatcattacttgtgattatccctaattttagatgcctaaaaataagatccatgttttcctcatcgctagcaatatattagcacgcgctagttcatattgaaaagttctacattagataaacttgtcaactaaaaattcaaaagacgtgcaagtatcattttcctctaccgaatatactgaaatatccttttgacatattccccagaataggctacctcgtgtagctgcactgaaatcacctttgtcagaaggcattgtcttgttctccacatcctcattgtccattttttttcctttctatttggtcacattcaatattttaaaagaaacaatgaatgaacattggttcgctcaattaactttaaccaaattcccatcgtatgttaacaaaagccataatttttgtagtgattgtaagtgcatcacaagataactgcgcaaggctagagccagctctttcaaggaaactaccaatcccaaataaaccaaacccaatacgacaaaaaggcccaatcttgagtcataaatagaggacaagtctttgatgattttgccactcatgcccaaaaacaaacccaccatcatgacccaaagaacttgtttggtctcttctggtcatgacccactacatgaaatataaataaagcatttttttttcaaatgccttggggctcaaatgatattcttcatttggttacttccacaactgccaaagtaccatatatttctactttaattaatactcacgaatgcacactttttctattccatggacgattcttagtagattccgaggaatcatcctatccccccacaccccacatgacaactttttcctctacttcaaccttttcattcttgacaaatatgcaaggcaatctcttccttctcaatcacggatccaacttttcttttctttctttttttttttttctggccatcttacgttattttatatatttttctttaattgacaatattctttctcttaacttactaatattttcacccatattaacacgggtatgtgaaatatatatcttaatatcacaaatcttgattattaacttttaaatagtaacatgtttagggatgattttttcctttttaaaccatgtgacgatgtaactttatttgttattttgaaatattataattatttaaattaattcaatttgatttctaatttaaaatttaaatattcagactttatattaaatcaaagatattttttagataaatgtaaatttatgattattataatcttagtaaatcttaatttgaattttaaattttaaatactatattgttaaaaaaaataatttaaaaaactttgttaaaaactttcatgtaccattagcttctttttttcttcttctttaaagcatgtaccattagttaatattattaatgtaaataaaatactgacattgcagatggaatataaaaataaattaaaaataagttgaagatattttttttatgtaaaagcctaatagactttataaataggcaaaatgatagtgttttaagtatattttacttgcttatattttcctttattctgtttaagattaatatataattttaagttgttataaattctatgtaatttaatttgttatattttataaattattgaaaataaaaaatatatggaaaaaataaaagcccaaaacataaaataaaacagaggtaacttaaatgaatcaaaaagtgaaaaaatttaaaaaaaagtgatgacacctttattgaaacagctcttaaacatatattacataaaataatgctatgaaaattacaggacccacttaacaaaccccactccctattgttccctggttactaaacttaaccacattttgccaccaccaaggaaattagagagaagcaagtttttattttcaaagtcttggtcttaattacgaccatgaagtaatatagtaaccgaatatgcttccaagaattctcatgctccctccaacgaccctttttatacccttttctaaccgccacttcatcacggcaagcatatgctttctaatattctagcaaaccttcgctactaaattcccctcttaacccctttttttgtaccttcatcatcatatatttcgcatcacaccaacccattttgatttgcatttgatcttcttcatagacatatacacactatcataatattattattttcttccctaaattttggttgtttttaatgttatgaagtttgggaagagactcaagcaacaaattcaggagtcgttgccggagtggagggacaagtatttgtcgtacaaggaattgaagaagctcgtacggctcatatcggcggcgccgccaacgttgttgaatgggtcattggaatatggcaagacggaggctgagtttgtgtatttgttgaacaatgaaatagacaagttcaatgggttcttcatggagaaagaggaggacttcattattcgacatatggtaatgttcttagtgacacactaatcatttttactttagaaatttatatatatatatatatatatatgttgttctatatatctcttaaatttgatggttactaaaacttcttacacttacaaggaaatctttgcattctttattaacaattttatttttattttgttgtaatgaattttttgtttgaataaagttagttgcttagaaattaagagtctaaaaatttgagtattttttataaggtgttataaaactttaagtaagatttgcatacaagacaaagtgaacaacgaaacttttaaactataggataagacgcagtaatagatcgagttcagagtccactatcattgcatcgtgtctgattacactcaaattcttggtcatgaaagtaatcgtacggtcttgtagtcactttgttgactgcaagaactccatatatatatatatatatatatatatatatatatactgatttagagccttgtttattatatatatatatatatatatatatatatatagttaaaaaaattgagatgattcgaacattataattgtaaagatcttgtggtgtaaaataatgtatgtaacatttaaataatatttgaaaatgctgtggttttgtgtaagttatttcatatgtgtgaatagcaatttatggtatatatgcttgttttgatgtttgtgatatatatctccaaatgacatttttcaacattttgtttgaaagtgataatatatagatgtttgtatatcacaaatgtttatttaacatttctcatttttgtatctattttatttatcatgcatgaacccttctctctttttctttctcatggcgtcagataatataaggtgtacattaacctttattcttattctaaacgataacgtaatttcatgtcatgatttagcagacaaacattattctttttattagaggggattaatacagggactagattttttgtgtgtagaagtttatttcatcgatccttcatcataaattcataatcacgtcgtttattccttacgaatattcttttgaatggttagttaagtgtaaaagattgaaagttatgcattacttctattggaaattatgattagagtgaggatagtgttggccagcagcgaaaacgtaaagacaaataagatactgttatttatactaaatcaattatagaaaatgttaacagttattcttaggatattagttaaagaattaaaaaagaaaaaaaattattagaatgtgtaaaattgtgttgtttataaaaaaattatgttcttttataatttttataataaatattttctcttcctaatttcttaatcaatattctaaggacattgattaacaataattatatgattggcttaataagtagtgggtctaccaaacgaggaaacaacacaatggttcgatatcggatattgttaattttgaggtttcattagttataagttttatttgaagttttagaaaattaaacttaatatgatctacaaaaccatagccttatataactgaaaagtaaaattaaacacaattttacgtgggataactgacagtacttgattcaacaaaaagaaaaaagctgatagaacttgaagaaatattttatagatagttatatatatatatatatatatatatatatatatatatatatatatatataagagggactaacgtaaaataaataaataaataaataaacaaagttttcaagaaaataatagtcaattcaatgccttaatcgttttaaggtgagcacgtcaatccagtaaaaaaaaaaaggtgagcatgtcaatctttaaaaatatatataatttttattttagtgaatgaagctcgtaatagtccttttaaaaaaataatgcattttacttaaaggaaataatataacttaattagtgaattttaaatatttgctctttttaattttaataaaaaatgtttttagggaatcgtggttttccctcatccactgtaggatcctacacaatacacatatgtatatgggtcagaagggagaaaatactagggcactatgatggcttttctcgtggaacaccgtcaccatgtgtttgtttaaccttaaatttctcgaatttccctatcaattttgaaaaatggaaacatcatgcattaaaaatgcacttcaattgttcaaacaattcaagctgatcgaggaacattatttttgggccccttacaatcacgttttgtcccacacttcccattaatttgttaccccaagttaggtgcagaaattctatattaatgcaacagttttctgtttcttttaacatgtttcaaggtagttgtagcaaatcatctttattattgttgaactacgtgtgcatagggatttcaaggaatggaagcacgtccactcgacataattaatatttgaaataaatgatgagtatgaaatttttataattagatgtttcgtgcaggaagtacaacagagaatcaagatagtagttgatatgtggggaccaagtggaagtcaaccttcagaagaagattatagagaggagatggcaaaaatcagaaaagctatcgttgatttccacggtgaaatggttctcttagtcaactacagcaacatcaattacacaggttttttttttttttttttcacaagcttaagctgtgcactgtttatactctaatcatacacagattacagaataattcattttcataacatttaatttaaaagttttatctaagtaaaatataattgtattgttgacgagtagtactgttcatgattaattacttaattttcacttgacacgtgattgagtcttattaacgtttttgataattgaaaaattcaacttggtatcatataaagattagttgagactataaacaagttatattttcgaattaaacaatagtttctttatatttaaggtaaattttaattggttgacgtgaaattattacataatataagattacagtctcaaataatctttcatgacacattactgatgtagaaactaatggggaccataaatgtatcagtccttaaccagtaataatttctcatgtttcacccttaaaactctctacaccgcatgaaaattaaagtccatgttaaaacatggtttgctattgattaaaaggctagcaaatgcattgctattgattaaaagtactttgatgcagctttctctacataatttgtaattcataactatttccatttgaatatgctaccttgaacaagtgacaaccctgaattttgcagggttggcaaaaattctgaagaaatacgacaagaggacagggggacttctgcgtttgccattcatccagagagtgctggagcagccatttttcacaacagatttgatctcgaagctcgtgaaggagtgtgagagcataatcgatgcagtgttcccggctgaggaagaagctgagagagcaaaggaagcaaaagaggcagtaacggtggcaggagaagggattttcagaaacacggttgcggctttgcttacaatgcaagaaatcagaaaaggtagttccacagagagccctttctctctgccaccactcaacttgccagactctgatctcatccgatcaatacagctcaatgttgttgttcccattgtcaagtgaaactagatgaaaaatagttaccacagtttaatttggtcagaaagaaatagatacttaatatagaacctgtttggatacaagtcataagtgttttttagaatttttctattggaaatatagaagtttttttagtagagaagctctcacaaacacctctagtctttgtatccaaacagactcatattgtgtttttagatatccgttccgacacctcaagcatctgttcgttttaatccatgtggagagaaacttttcggtttgggtacatttaaatgtgtgccaacagttattcaaacacatctatagtgttacaatgttacaattggatgtaagagtactacaatgtattagtaattaatgagtgatctcaatatatatcctttcgatgaagtaacacataagttaattataaaagagtagctagcaatttagctatttcaagattattttagtaattattgttagggtatttaaatttcatttcagggtgatatggtcaacatattgggttctctatgaattagaaatgaaataaaaaaaaacagttctctcatgtccattccaaggctttttgtttaagttgtcttgcccaaatcttataaataaaaaataaaacattaggagaattttgttctcttaattattataacttatcaaggaatctaatttaaatggttaagtaaaatatatgaactattataaatcttctgatgttattttcatttattacgtgatagaggattatccaacgatcatgaagtcttagaagcactccatgaagagctcaataacaaggtccaaagctatgctcaaggtcaaggagttgaagaacatcatttgattaactttaaaggacccatgacaagagctagaactcaagcctttcaagaccacataaaaaatgtcttatatcttgtggacaagcatgaagaggtacaccagattcaatgaaaacacaaaaaaaagttttgtctgttgtaataaacatttgttgtctgttttaatcgattaaatgtgtctgtaatcgattaaaatgcaaatgttgtctgtctgtctgttttaatcaattattttgttgctggaatcgatgatttgtctgttttaatcaattatttcgttctgtaatcgattaaatagcacagaatactctgttttaatcgattacgtttcgttttaatcgattattttcatttaaaatggtactgcagctttccttttgttgttttcttgtaataggctttgatattttcgtaaataggtctaaacttacgttttttaggggtttattagaggtctagccctataaatacccagactttgctattttgggttaacttttgattcatgaaattgaacttttgcttgaattgagagcttagcctcttgttggttcttgattgagaccaaattgattcttatcaatggaactttcatttgtggtgaatcttcctctgacttatcatttcgattggggattgtggcgttattctaaatcatttcttaatattctccatttttctatttgaatttcaaaccctaattcattgagtcttgaatattacaatccgaaaacaatccgaactaaacattcatgttttcgcagtcatcactacggacaaaaaaaagttcatctaacttagactaatctattattgcttagtatgtgttctacatacattagttatatcacccgggttctatattggatgctctgcatttgtgcggacacaaagaaagagtatttatccatgttgtctgtcctcatacttacactttaattatgcatcttttagcaattatttttttattttaattgtgctcttacgtaaaagattgtaagcatcctcaacgaaaaatattgtatatgacctattagcaaaggggcatgtgatggatccccgattctgaaccatgactcttcagaaatatctagcattatataagaacagaatttaccaaccacaacattggttagcaatttagagtatagatcctttaccttcatgaacttttcttagtctcttgaggagcacatgacgtcttccgagtaggaatcagaacaacataagagattgcaaccaatctctttttcaagtggcatcacaaaagcaagttgataaatggtggaatatatgagtcttataatttgagtataatatctatgatattgatagaatttttttcttttttgtttgtaccaaagatatttttcaatcaatagtagaaaactaatttcttttgaaacatagatatcattgaagtgacttttgtctttttcaaaatctaattatgttatatcttatttggtcatgacattgatagaataggtggccactatgtacactttcttcggttcttccatttggtattgaactattttgcttacgaaaggataactcttagtaaagagaaatttccttttgtatggaacaaaattaaagcttaaatatctgttcccttgacaaagtcaaagatttgaaaatttattagagcagaaaggttgacattgacaacgtgagtacgtgacaccagttccaagatataaatgtggtcccatatatcattttgttatgacttttgtacaatggacccaacaacaaaccttgttgagttttcatctcagaatttggaagcatgtaccaacaatttcagtcagagcaatctcattggtttgacacagtttggtagattgtatagaggcatccttgaaggtcaacatgtagtagtgaagatatgggatggtgaaagaatggaacagttaagttccaaatatgatgatgagaatttgattatcaaagcaagttcccaccccatcgcttgcacttttgtataaccttttttcttatattttttccaaatttaattttgtctgtcactgattttggaagctcaacgattctgttttgcaggaggaagtaaaattttggactaatccaacattgagaggttgccccaatttggtgaagttgattggttatacttgggagagagatgtaaagggaattgcgtatgatctcaatccacttgatactttgaataacgtaataatgaaaggtattaaactattaattactttatacaagctttgatgattatcaccttcaaatgtcaacggttaagggaaaaattcaaaactcgttttaattggagaataaaagaaagaatctctaacgggttattgccttttcattgttattgaatgatatgtataggtactaatccttaatctatgttagtacatgagaatttatcagtaaccaagttgtgggatcatttcaataattatttttggtccttgaattcttgagatataataggaaccaaagataaatgatttactttggttttctgatatgatttctttgctgaggcagataacctgaattggcttcagagaataaatgtgattcatgaacttgcaaagctcctgaaattcattcatgaccaggaaaagcaaaatatggtgttgaatatcagtgcatctcatattcttctcgacaaggttagaacattattatgacaataatcctcttctcagcttctgaaaattttatgtattgatgtttcctttttcatttgcactttctctgttttgtcaatcaacatgaacactcatttctgatgcaggattacaagccaaattttattgatttggtgttgcttagtgaagtgacaatgtcaactggctacatcgatccttatttttctctaaggggtattaattttttttatctgcgtcgaaaatgtttcctttcaatttgttttcctactatagtactctaaaatatgttattattaatttattaggacaaactttaggtataatattttagttatattcagtactgttcttcaatagagattagagttttacttcagtaaagattagtgctaattagtaaagtgaaactctaatttcagtgggagaataatattgaaaacaccttgttcttactttaagtacgctccattattaaggtcactacatctgggatattacctgttttgtctcttgtatgagcctcatggttttgtatttaaaagacacttcattgcataaagcgtggaacattttttgtaggaccttgcaggccatgtgtgtgacctaggcctttcttctagagctaatattatgacctcgagtcatctgcattgttaatatcattgtattcgagttattgtctgttttgatgctcatgtgggtctcatggaattgttcttaaaagacccttcaatgattcaagggtgtgacttttttggtaggacgtggccgagaccctcctgctaatgtttttacctctagtttgcttcattgttagaattactgcattcgatatattgtccattttgatgcccgaatgaccctcaagtttttgtctataaaaatcatttcagtgggttaagaaacaaaattgttcataaactatccttcatctccaattcaccattgttatgcaatataggatatttttggtgtaccagaagagcactaaataactgtctctaagttttgccagtttctattatcaaagcaaaaagactttctgtgtctgcatatatgctgcattagtgcttaaaccaaactttctagtcctgtcttttgaaaaatctttgatgttcatttaagttctaattgttttggtaaaaaaaaaataaaaccattcatacggtctatgatgtaagattgaagcctaagcatatatttataattaatacagtaatgcacataacacaatcctcttttcactcaatggcaggtggtgaatgggatagaagctgtgaagtgttctcatttggcattgttttgcttgaactaataaccaaaagagtttcagtcattgggaagacagaacatgcaagcataaacttggatggtctggttcatatttgggccaagaaagaatacaagccaaattgttctcttgtccatgaaactttgcaggaagattggtgttattatgcggaagacggtgttgcaataactttattggcattgcaatgcatagaattttttccagcaaaccgtccaacaatgagggatgtcttgcacaggctacttttggtgttacaacgtttggcggatgctagagccaccaaaagggaaaagcaactcatttcatccacgatacaaatttagcaaacttttgtatgccaaaaatgtgtgtatataaaaagttaacagcttttcctaactttactgctagtagggggagtatgttattttttaagcaattgagatttcttcaaatgttttaaattctaccatttcacttctccctatttcctctgaacctctctttccttccattcatctgacagtactattaaagtttccaataaaacacattccaaaaattgtctcttacgctcatcattccgggagtaaacatatacgatgaaaaatatatggagtatttaatgtcatgttccttttacaccaatgaaatcagtattagagaacgaataaatcagttaactgatttatccacccattctgaaaagtgtcaggactggccctggttatatacccatcctatattaaaaaaatcatgcactactcatccatactcggatctgaactcgataaaagtgattattttccgtcaaagtcaagacaagttcaagtgggtacccacaagttagaatttctttgccatgtagtttataatagtttaacccattcttttactagtttaatgacgtcaatatcaagtccactacatatctgatcgtaaaagtaactcgaaccaagttatagatccggttcccaattagaccagccaatctgagttggatttaatgacagtgccccattctctaatgaagagcaacaatattaatctcagttgtataagctagggtctcttcttcccttaaagctaagttgatattgacaatggcaaggtaaaaaactagagcttcctttcaattctcattattggacctattcaaatttttcacagaatcagacatagaaactaggggtaaaataacaaaattactttaacatgcacaatacaatatatgcataaccaccgtacatatagcatgagtgcatgacataagccccaagcaagctagtgtaatgagataccaactgcttccggtgttcaagtcttttctaaaaatactttaattctacacccttgtgcgtctaagataagcttttaaaacattcaagtggacacatacaccaatctgaaaaagtgtagtgacgtccttgtggtttggccaaaaaacaaagaccatgatgtcacttttttaagatccagtttaccaacaaaatcaaaacattccctttggaataaaatttggtttcaaattgaccatgttacaacgtgccagaactattgagaatccaagccatgagtagacagcacaccaaagctaataataagacaaaggacatgaaaaaacaaatgatcagttttcatcacatgtagtaaaacagaatacgccagaaatcccttgtagctcattttacctactcaaaaccttcaaaggcagggaacacttccaaatatgtgtgaagactatgttatgctttgactatgagtatatgtttccaagatctacctgattctgcaagaaggaataagcttacttaacagaaaaatattaagagttgtcttccttcctaatccccttatccagctcctcttcttttaagttgacaaaaaacattacaaattggacagtttataagttaatacttaattaagatttcctcttcccacacatacaatctcctcctccaactccaaacttcatttcaccactccatcatatgtgctatcatagcatttttaattatctaaggaaagctgatagaaccaaaataatccttgataccatgcatgagtcaagctgatagatgaattccaatcccttcttccaataaaagtcattagatcaaaagagtcatatttatgttgcagcatgatatgcgtctagcatataatgttttcaagctaaaataagcaagaatagaccaaaatggaaccataaccaacctcatttgtggatgttttgattgatttactccaattcacattgtatctcattttgtttaatttatagcaggaaaaccaagagaagaattgaagaaagcaaagatcaagaagccaatcttttctggaatctcacgcgagtagcgtggaatctcacgccaggaagcagacatagggcaatcttctctggaatctcgtgccagttgcccgagagatggcaccagtcgcgccataaaccttaaatggacagattttttctggaatctagcgccatcagcatgagatctcgcgccattcacgccaaagatttaaaagtcagcaattttcactgtgatgtttgtcattagcgccaacgatgcgggatttcaaaatcttaactgatattgcacaaaaatagaagataaggcaggttttgttaacctaaatataaatatggactgaggagagcagagatgggggggctggactacgaattaacataaaaagaaatacaagaacagcttggagagcgattgaagttaggtcaagaagattaaatcaagattgaagggacttacacttcttcctcttctcttttgagattcttagtttaggtacatcttgttgatgagattaaggacaaacatgattatgttgggctaactatctctattgtagttaagactaccatctaatatgaactattttgatattggattgaattctattattattttatgctaaattattttatttcactttgggttgaatgaattatatgtctttattgaaattgatcactttgataaagttttgagaattaaggtttataataggaatattgaggttttgatttctaacaaaagtggaataacaattgatacattacctaaggatagagatgtataattacagatgaattgatgcgtctcacttaatgcttgatcaaagaggaatcactaaggaattggggtttttacttgggttaaagtactaaggtattagtctttaactagtattcatttaaagaaacattatatgaataattagtataattgaatgtaataatcaatctaattagataagttgggatcaaaacagtgtgtgtatcttgactacaattatttctcataatttcccaaaatccaaatattgttgtctttgaattcttattaattctagttcttattctttaatttttatcaagtcaagatattaaaactcaatcttatcaatttttcttcatccaatttaaagaaaatagttgtgataaatttggtgtcttaatcctcgtagatacgatactctacttatcattttattacttgaaacgaacggtacacttgtcaagttcgcaatacaacaatttataccatacagtttgtctatcaactaggaatcaccacttccactttgaaagaagacttaaattagaaagatctatatttttaatagccaacctcacccaagctatctattttgcatcttcgccaacagaccataagaacttaagaagatatctttcgattcctatatcacagtatttataactttctttggagcttaatttgaaaaatgactagaagtttaatggtaaacttgagaggacaacatttataagaacaaattcttccacctaatgacagcaattttcctttcaaagatgccaatcattttttcacagattcagtaacaaatcaaacacgcatatagttggagacatcttcattaatattgggggggggggggggggggaatatgttgcaaaaatttcagacctcactaactataaaaaagaaaaaacttagaccttaccatactatatttctttaaatatttcgaaagaggatgagttgaataggaccttaatagctctagcacacatttaatcaggtctagttaaacttggttgcataatctggtgcaaaaatatatggagaagtcctacttgtttaaaattgaaagtgttggcattttcttagctggtgataataatagaccgaatcccaatcgttaattttgtccaaaagaacattgttggcaatcccagcccaatgatcaactttgtgttttctgctgtaattaatgaaactgattattttgtttacttgcttttaacctacaggtttgcgtaagtgatttggtccaaactttatgtatggctcgtttttagttcaatttttccttcaatcaacccattatctgtcacacctaggtctctttttaaatataaataattcaaacaattttatgcggtcatatgttctctttggttgatttatatataatagaattcgatttaggagtaagccttttgatgggatatagtgttgctagatttgattaaaataatgtctgaagtcataattttcagttagttcatttgctttaaggaaatgatgcatttgtccatttgattacgtcaagccctactgctagattataacttataatgatctcattatatatggattagcgtagctttgtattctcgtcatatattagttacatatcccgtatatatctacttttattggacaaatagtgtgctgtggctattacaaattggtgggagccaatgtgttatattcaccattttttatatgaattttttatatgatcacatgaagcataatctttttttttaatccaataatatcattattttaatattaatttgatccaaaagaggaaaaacatatatatttgacccaataagtaattgtttcaaatgataattgacttgatttatttaaataagatctcatttagagtcttacggattaaaaaatacataactgaaagagaatatatcataaaaaatgatcaattaaattctctaattaattattaaagttaataaatattttatactaatataacacaataatcaaagaatgtaagttgccttttctccgatccaacaacagagtgttcctctttttattgcttcgaaatatccaatcgtaatttaaacacactttagcaaatactcctttaatacttggttctttttactacaatggttatattttgtgtcaaaggcatcaaacaggataaattaataggtgattttggattatcaccttttcatgattcctatcaatttttatgtgacacatgattaaatctttaaaaaaaactaattaataacattttattacatatcatttataaattagtggatcatgaatcaagtagtgtgactcaagactacataatcatgctgattaaaaaaaaccagctaatactttctcatgttgcatccacatgtaacttcttaaattctaataaatttctatcaacaatcaaaaaagagcatttctaatattgaggaagtacgagtaccgtcactgccctatgcgtccacaaaacaaatttagatagtcttgaagctgggaagctgaagtcattatagttcccaaaaccttcaacacttgattttggagcaagtgataagccagcattagtgctatatatatccctatgacatagagaaaccataaatggttgcctggttggaagatgcacaataaggaggctgaggaaagcaaacccaagacaagaagaacatgtttgaggataaaagcaaagtggccactactgcaagccttaatgttgattttgaatgcaagaatcacactgtaaaagcatatggaagttaggaaagtccacatgtgaattgggtgtgtctcgaagggcgatttggtcttgttttgatactcaacttgaagggctccaaggaattgttgattcagaaacatgaacacttcatgcgatgggaatgcagcaataaccagctcttggtccttctttttagttgatgtgctacaaaaaatagataaaaagacataaaaatgttccagtactgaactgaaaaaatgctaacaagatattgtgcaatggagtattattttatttgtaagaatttatgataaattttctaggtaaacgagatgatatagtaataagactcaattcatttcatgaatcccgtacagattcgtgttaaattagcacattttgtatgaatttcaatcaagaataaaaacaataatatatagaaagatatagatgttgctgacattgttatttatgttttacaaataactagtattttttctgaatacaaatgtctgtagtgcatataacataacttaaatgttgtgacaggttggatcagataaggcaaaatatgagatagagaaaaataaaatgggagtaaaatggaacacagacaagacacagaaatttaacgtggttcggcaatgtgcctatgtccacgggcgaagacagatcaagagtttcactaaaatgaagaagagtacaaaataggaaaaataacactcaaaacccaaatcccaaatatacccaataatcctcacaggaatatcacacaaaattggatacaaaagaaaaatatagaaatgggtatttttcctcacttgctattttctctctcaccggtagctactccttactttctctcttgatgctcaaaccgaatgaagaacgctcctttatatagaattgcaaaatactgtgcctcatactgtgcgttcaataatttctgctttcggtgcctaactgctgcactgtgcatttgaaaaagtcaaaagtggctgctgtgctttcggtggaaactgcgcctacttcctctgctttttcaacaaatctcccctccagcagatatggggataaagcaataaactaaactcctcttcattaaaatttctgatacagtcttctccaagaaatcctaataacggattatggcttatgaacgccaaccaagttcgagcaatgattgaacttgattgttgtgataggctttgtcatcatgtctgctggattatctattgtggcaattttctcaaccttgatagatccatcagatataatatttctgataaagtgatatctgacatcaatatgtttggtccgttcatgatacatttgatttttggtcaaatgtatagcgctctggctatcacaatagacaactaataaactttgttctaagcctaagttagtgaccaaacctcgaagccaaatggcttctttcactgcctcagttagtgccatatattctgcctcagtagttgaaagagcaacggttgactgcaaagttgctttccagctaacgacacatcctgagagagtgaaaatataacctgtcagagatcgcctcttgtccaaatcgcctgcataatctgaatccacaaaaccaacaacactttcagaagtgttaatattgctacgatcgaagaccagaccaacatctgaagtaccccgcaaatatcgaagtatccatttcactgcttgccagtgttccttgcctgggttttccatatatctgctggcaacactaacagcatgtgaaatatcagggcgagtacaaatcatggcatacataagacttccaacagcactagcataaggaatacatgacatgtgttccttctccttgtcagtttgtggtgacaacttcgctgataagcgaaaatgcgtagcaagtggtgtacagactggcttggaactttccatcccgaaccgctcaagtactttctcaatatacttcttttgagataagtacagcttgcctgctttacggtctcgatgaatttccatgcccaaaatttttcgagctgcacctaagtccttcatctcaaactctgagttgagctgagatttcaacttagaaatttctgacatgttgttagcagcaattaacatatcatccacatataataatagatacaaaaatgaaccatcagagagcttcctgaaatacacacaactatcatagttacttctagaataaccatgatcaatcataaaggaatcaaaccgcttataccactgtcgtggggattgctttaacccatacagtgatttattcaacaagcaaacatgatcttcttttccctgttcaacaaaaccttcaagttgatgcatgtaaatttgttcttcaagctcaccatgaagaaaagcagttttaacatcgagctgttcaagctccaaattatacaaggcaactaatgcaagtaaaacactgattgaagtatgttttaccactggtgaaaaaacttcattgaagtccactccttctcgttgactgtagccttttgctaccaagcgtgccttgtacgtagcatcttgagctccgggaaatccttcttttcttttgaagacccatttgcaaccaatgatcttttggctctttggcggtttgactagctcccatgtctgattcttgtgaagagactcaatctcttcggtcatagcaacagtccatttagcaaattctttgcttgtaatggcatcacgataattggaaggctcctcttcttcgaatgattctgccatagtcaaagcataagcaactagatctgcataagcatacctttgggggggcttgatctgcctgcgttgtctccgagcagcaatagtgtcttgttgcaatggtggtgcttcctcatgttgcacctcctcttctgtgggctgttctgtagttgcttcgggcatcgtttccgaagcatcaaattgtaactccacctgatgtttgtcactttcactacaatttgcatctgtatcaaatgaatcctttttctggtgaagcataaaagattcattgaaagtgacatccctgctgattagaaacttgggtgacttaggatcaggacaccacaacctgtatcctttcaccccctgtccatatccaagaaagatgcacttcttggctctaggcttcaattttccttcattgacatgagcataagctggacaaccaaatattcttaaacaagaataatcagcaggtttacctgaccataattcctcaggtgtcttacattcaatagcagtcgatggagacctgttcaccaaataactagctgtgttgactgcttcagcccaaaacttctttggcagacctgcagtaaagagcatgcaacgtgctctctccaaaagagttctgttcatgcgttctgcaactccattttgttgtggagtacccttgaccgtacggtgtcttacgatgccttcttttctgcaaaactcattaaattctcctgaacagaattctaaaccgttatcagtccgtaaatgcttcacctttttaccggtctgattttctatcatagccttccattccttgaatttctggaacacatcatttttattcttcaaggtataaatccagactttacgggaataatcatcaatgaaagtcagtaaataccttgcaccactgagagagggaacttgtgaaggaccccatagatcagaatgaatgtaatctagagttcctttggtattatgcacaccagtaccgaatttaactcttttatgcttgccaaaaacacagttttcacaaaagtcaattttacatgttttctggccacaaagcaaaccgcgtttgcttaattcggtcaagcctctctcgctcatatgccccaagcgcatatgccacagaagggtagtgtcagaatcaggatctactgttgaggatactgaagcagagccataaactgtatcaccctgcaagaaataaagaccacctcttcgttttcctttcatcacaatcagagcacctttgacgactcttaacgttccatcttcagcagaaaacttacagccaattgagtcaagagtacctaaagagatcaagttcttcttcaactctggaacatgccgaacatctgtcaaagttctcacaacaccgtcaaacatcttaatttgaattgtacctatcccaatagttttgcaagtcatattatttcccattaagacagttccaccatttattgatctgtaagtggtgaaccaatctttatggggacacatgtgataggaacaacccgaatcaagaacccactcattttctgagctataatcagaaacagtgactgaaagaacattatcatctgaggaattttcctccacaattccagcaacaacagaagaactttcattattattgtcccttttgtcaaatttattatttttcttcagtttaggacaatcccacttagtgtgccctttcttgtgacaatagtaacattcaatatttttctttgatctagattttgatcggcctctatttactggtcctttattttgactcctccccctcgcaataagaccgtcaccaatttcatcggtgttattgccagaaaccttttttctcaattcttgagaaattaaggatgccttaacatcttccatgctaatggagtctttaccatagagcaaagtggtaacaaaatgctcatatgaagggggtaaagaacataataaaataagggcttgatcttcatcattaattttaacctcaacatttctaagatccataattacccgattaaattcatcaacatgttccttaataggcgtaccttctttcattcgaagtgtgtaaagactttgtttgaggtacaacctgttggtgagagattttgtcgcgtagagactttcaagcttctgccatacaccaagtgcagtgtcttcttccaccacttcgcataacaccttgtctgagaggttgagaataattgtactgcgagctttctcatcaacatctgtcaactctgcagcggatggcgctattcttgttgcagttgttgtgcttgtagatgcagtgtcatcagctgacaatctttctcttggcaaaagtgctttttgtagtccttgttggaccaaaatagcacgcattttaactctccataggctaaaactaattttgccatcaaacttctcaatctcaaattttgccgccatggtgttggcgatactccaaatagtaactgctccggatcacactatttttctgtgaatagtgtcgtatacgtgaatagtaccgtacgtataaacagtaccgtatactatatcatatgtatgaatagtgccgtatactactgttcacagccgccgtaatagtacccgtgaatagtatgaatagtgatgaacagtacgaggtcgtagaaatgcatacgacttccttccaaaaatccaaccagtatgctctgataccagtttgttgtgacaggttggatcagataaggcaaaatatgagatagagaaaaataaaataggagtaaaatggaacacagacaagacacagaaatttaacgtggttcggcaatgtgcctatgtccacgggtgaagacagatcaagagtttcactaaaatgaagaagagtacaaaataggaaaaataacactcaaaacccaaatcccaaatatacccaataatcctcacaggaatatcacacaaaattggatacaaaagaaaaatatagaaatgggtatttttcctcacttggtgttttctctctcaccggtagctactccttactttctctcttgatgctcaaaccgaatgaagaacgctcctttatatagaattgcaaaatactgtgcctcatactgtacgttcaataatttctgctttacatgcctaactgctgcactgtgcatttgaaaaagtcaaaagtggctactgtgctttcggtggaaactgcgcctacttcctctgctttttcaacattaaaccttaataaaagcatttttaaattgtttaatactcattacttaagcgattaatttgtttattgatgcttctatgttcttctttctcaagaatgtattcataaaataattcttcattagtggatgatgacaaatattgctagctggggaaaatgaaaagatacaatgtgaaagccacaaaagttaataatttttgtccagagtaagatggctagcttcttttttttttttcaatgatctcaaaaattaaagcgtacaagaaaaatggctgaatgaagtatatgcaagtgtagtctaaccttgaggttttctttggtttaacccttagcgcaaggttaagtcttctggctcttaacctgtggattggaatatgaacatgcttatgatcaatattatcctccactctcacctcgctgatctcaaacttggatctttccatattgttataatgaaacaaacgtttgtccacaagagaccatataaatagatattaatgaattatgcatgttaacgtttgtggtttccacctaagcaaatatgtagcgactttgtagtaaactttttacatgtatctcagctgactttgctcatccagttccgtaagtagctgttttgaaaagttaaaaaaaaaaaaaagaaattaataacttaaaaattattttcatttgaatgttattattattttttcatttttaattaatattcaaaaaaacatccactgatctaaaagaaactcattcactgacgacgttatctctttttatttattaatgcttatggcatacctcattgatcttgacactttctaattactttccaaaacttttcttaggccggttatcaaaattaaaaataaaaagtattcttacgtgagcatttttaggtatcatttatcttgataagtctaaattacgtagtcgagttatttaattaaacccaacttttaaaggtttgtcgagtgggaaatgtgtgcaagctaggtaacaaatattaggaagtttcatattttctgtcttaatttttggaatataatttatatatttgttatacaattttacttagaaccaattagttttaagttgaaatctaataataaattaatatcaatgagaatgtataatccaataataaattagtaatgcttctactatggctgttgcctgttacatacaatccaatatttgaaagttattgaaatagtgtttttaattttgagaaagccagacgaaacatggccttctatacaattagtcctataattgatctgatcgatcgaagcttgtaggatcgatttaaacataaacataaacataacaataacaataacaacaacaataataataataataataataccaaaaaaagtaatgaattggagagttaggttttcaaaaataaaattgcaaattcaaaatttgaaagaaaaaaaccagtgtacgtcataaaatattctctagtcaagggcttttatatatctcaccaatcagagtgtcataaatgctagatcctaatatattatttgtcttttgtattatttcaacatcacctcatgggaagagaaaaatacacaaataatcaagacattaatttttttttctaaaaatgtaatttatcttctcttattttgttaaattcacaattttagtctctttattttttaattgagatatttatccttcacttttaaaaaatctgtgattttaatcgatcccctactttttaattgatacatgttgtctcttacttttaaaaaatatgtgattttaatccccttaatcattttcacacttgattgtgtattatattaattctttttttttaataaattaagatcattagcaattaaaaaaaaatatttatcatatagataataatcagacatgtattacagaatacttggaccaatgtttgaaattggtcatagaggctaaaattatagattttttaaaagtgatgaacaaaatgtctcaattaaaaaaatgaaagattgaaatcattaaatttttaaaaataaaagataaaatatgtcaattaaaaataaggagaataaaattattaatttgaaaaaataagggaaacaaaattacatcttaaacctttttatatatgtataatcagactaagactgccgatatctatttactagctacgatcgagcgtatgactaatgcagattaagtcaaatactaaaatttaattcaaaaacactaatatcaattaggttagagttctaaaattaaggttcaaatgatgttattttaaattataaattttctataaaatgtaactatgatgctgtgtgaacaaaacttgtacattattatccaataatatattctcaccctatttaatgagtttgacatttcatatattggctattatacttcaatttattaagtgaaaggccccatacaaagttttaagaaaaaaatatgagttaaactctttctattggagagaagatgttgagatcctcatataatgcatgtccggaaaaggaaaaaagaagcatcaatttggacttttacaataataattgttatggatttaatatatggacctagtagtgttaatcatataaagttccattaaggatccaatgtctagaatcttaacaataatcaagaagatctaaacaaacgaatatcgagcaaatcgaaaggaggcatcaactaattcagaggtaacttatttataaataagggttacattcatgaagaaaggtacatgttctctctactctacttttccattaacactatacacacacctcaccttcattggttggtattaaagtgcatagtgatcaatattcttaaaggtatttttttcataaataccttaaagagagcttttgattcaacatcaacgtactaattaacaattctgctagacactcttattcataaaaacagaataatagtaataaaaaaaattacgaaagtagggttgcatggaaatcatttaggatttatggattatgttttacatgttggattcagcaaacgtcatcctgagtgaaatattgtttttgtctttcattttttttaggaagtgccatcctaagtgtagtactagtcatggttgcatagcataggggaacaggaggcatcatcctaaatggagatacatgatgcaccatcctatatgacatttttagtgcataattgttattgttgttttgtaaaaattacgtgtcaaaaggttaatcaaaatctacatggataagaaatgaaatagacttcatggaatcacaacatagacaaacaggtgaccatttcaggcattgataaacacgttgtcgacacgcaccaaaacaattttactaagttaattctgtaccacagagctaacttaggtcgactcagagacacagtcaatatggttctagtttcaatttacaaataatagtgagggaggaattttatcaaacagtttgtgtgcgtaagtaaaacttgcaaaaaggtaaattaaaattaaagagcaacaacacagaactaacagaattcaaaagaagtattctaaaacagaattaaaacatcaatccaattctcctcactaagcaattcgaattatcattgttctcagaaatttatcctattgtgaaagatcattcaatctcattagaagcaactcaatcgaactaacccctaaattgattgaaactacaaccctaactgaaatatcatccaattaatctgtgattaatattcgaaattaggaaatgaatccataacctaatccgttttcaacactaaacgcattcataattatgaaaatagaatagcaattgaagaagaagatgaacattcacatagtattcgaaatattaaaccagaactcaaattctccttgtgcttgggttggatccttggattgattgaggatttagccttccatgatcatcatcagtgaaagccccatgaaattattgcacgagaatggaagaaaagaaaaacgaaaaatgaagaacaagcaagaacagtaaagagaaaatgaagaacaagggtttgattctaataactaaagaaaggaaataaaaacttgtttattgaaattgtaaagtgtggtgcccaagttttactaaagtcactaatatatgtagtgactgagttttgaaaataaaatgggtcacaaacaaacccaacaatctaattatttgctatttacaaccatgaaagtcaaattcgcatcccaaaatcactaatatttgctattatttacgccatcttggatgacacatcctgtatcaccatataggatggcacttcttgctcacctttggaatgtgacaatgattggtcaaagctttgaaaacaatagaagacaccatacaggatgacacttcatgatattacatacaggatgacatctcttgtataaattttacacttgttagcattgtaatgtgattctaagcctagggctggcaaagcaaggcagcccaacccattttggtctatcttgccatttgcctgccaaaaaactgggcaggttagtacgccatctaatggggcaataaatcttggctcgccccgcttaggagttggttggtgggccaacataccaaaaatgaaaaaaaaaatattatttcatataattaatcaaaatgaataaatttagttagaaaacataaagtatatcaattatttatcctaaaattgattttaatatgaattttttactagtattagagaaattgaatttataaaataatataataataataaatatgtattttgatttttgagtaaaactataaacttaaaaatagtgataatccaaagcttaaacacctattagtaattatattttttaaaaaaatataattatgtatggtggtcaacctgtcctgcctcattgttggcccatcaagtttactagttaggtgagatggaccaatgcaaattgatggattaagccacctaactgatccgttggctcaaggccccattgtcaccctaattataccacccaggatgtcacttcctataaaaggacaaaagatacaagcaagatatcacttaagatggtatctgtggcaaaaacaatccttattcaataaataatttttatactgttataaaaatattattactgttttcgtaaacaaaaagtcattcaattcgtggctttataccttgtgtgccttaaattgaagaactatcttttgtgccatttacacctaaaagtctaactcaagttcgtctaaattggcaataattgatttataaaataaatataaatgataaatttaaattccaaacttttatttaattttataaatattatataattatctttcttaaaaaattaataatttatctcgtcgttttgcgttctttaaatatctacttccgaacatattcttttttaaaaaatctctagaggataacttgaaatggtatatttatatataccattttataattataatgaccataattaggctttttaaccttttaataaattaagggagtttatctcaatgatatgtgaaatgttgtaaaaaattatatccatttcaatttcaatagataaaaaaaaaaaaaaacttttcgtaagacccaaagtatatttgcaaatataattattacttgtgattctttggtgaccttattatgattttttatgacttattacaactcattcgacaatgattatttctttataagtacaataactcacatattttattcaaatatgacaataattatttgagttagccttattgttattatatgttttttgtgcgtctcattggtggcaggtaactcaagattgaaatgaccaaacagattattgaaacctttatttgatttttgtttttgacttgtaaaacaaaatgttacaatttgcaaacctataaatctataatgtccattttttttcaaaataaattgatatagtatttaaaatgtcaaactgataacttttttaaaattactaattaagaatggagtattcaattaagattttaaaagaaattttttacataataaagtcatgtagatttaaaaagattttgtaaaaatataatgatttttaagattttttttaaaaacttttataattagaattttatagtaaaaatttcagtgaatttacaaaatatgaatttataattttttaaaaaatttataaaatttttaaggatttcacgaattatcaaatattataacaatatttatgataggaagtgagtcctaacaatagttatatttaggcccgattaaaaattgtgtctatcaatttgcttcagtattgaaatactctattgttgaagattgaagttcaagaataacgaaaatatttttttaatatgagataaatcatactttttttttactgaaagggtgaatcatatttaagagtactaacaaaaacataggtgttaccacgtctatatgtctgtatttttatttcactatcacatttattgctaaatttgatatattttaccatatattatgtattgatatatacattaattttattatttgtactaattattatttattttgtgaaatttgatatcttataacatttttcttttattatgcattgacgttttggtttaatatttttcctatatattatatgtttacattttttaactatgtatgcctctattgcttattgcttatggtaattattcactgtacacaagtgtaaacatacataaaaaatgatggaaataaattaacctaaaaaaagacaaaagtaagattagattgtcgattgtagacaagaaagaagtgtgtgtccaaataaaatatgcaacaattatacaatatgtgtataaattaaacaacgtccaaacctccaccatcaaataatttgttaataatatatttgtaaagaaaggttataagatagtatataatctacattacccatttgatctatacatattctatacattgtatgtggctataaacaactaataaatatattttttttgtttgtttttgaaaggcaataagtatttttttgttaaataaaaatatccataaacatgtataaattaagagatactctatatctataatattctatatggttatataataatgtccaagtctccatcattaaagacaaatttataataatttatatggcataaaaattctatgcgcgattctcttgttgtactcaagctaaattacttaacacttataattaaaaaatagtatttaatattgttttttatctctgattctcgcaacttgagtcatgaaactacataaagaaaagaaaaattaagcatgtgatagaagaaatgtaagaggctcacatttaagaaaacaaaatcaaacaaaaacttaaccggagaactaaatttctatctttgctacgtgcacttaattcacgtgtaagtttaagaaagaaggttacactcaagtatattattattgacatctcaaatcacacatgcatagaagtttaaaagaaaaattataagatactaaaagagagaaaaataataatcattcttgtttaaaaaactgaaaattttcaataaaggacatgttggtgtttcagaacacacacaggcgcgatttttattttttttttaaaaaaagatagtataaaattaagaagcctaggtaggtttttaaaaattagtagatttttaaagtttaaaaaaagacagtttaattaacaaattaacagattatttaatttaagtttaaaaaaataccgactttagaaggctcacattttaaaaatagcaatttattaaactatataccgactttggagaataatttttcatggactataatttttaacaaataaataaattgatcagtgtatctacaaaaacagaatattaggcatcaacattgttaacatattgattgaaaaagaacattagcactcattcctctatgatagtggcgttgaaagctagtgtttttatatgttgtttcgtctttgtattgtatctcatcaatatgacaaattgatttttggcttgatagtagacttcccctaaaaactaaaatcctagaagacttttgttctgaatccaaacttagtttctcatctaccatcggtagatacactttcagtcaataaattataggggggggggggggggggggggggggaagcactaagcacacacaaaagttaaagcctcaatacacatgacttctcaacaaagacaacttcaacaatagaaataaataaattttttatgcttatagaaataaatgaatgaataaaaaattcacagtctgatgcatcaatttttctaagaaaaataaaatattaatacatattcaagaatttcaacaataaaggtttttcttgaattttgggaaagtaaaaaagttaacaactttagaaacggtaaagaagaaatgttactcattgttgctcttgtaaaaacttatttatgcattatggtacatagatttgggtgctgaatcgtgtgaaggttgatcagatagagattttccttgaggtctgcactcttccattagattttctttcttgattagaaaatggagatttgaagaagtctacggaacattacaagaaagacacaacattaaattaacggtaagcatgaagaattttgaaaatggtagaaagttttggaaaaaaatttataacaaaagtgcctgagaaaaactgagaaggaaatgtcaagatatttatttacttttgtactctcgactatgtgagcatatatggctaacaattagtctgttccaatggcgacaaccgcgtaaacaatataattagagaggggttgagaatgctagaatgggagttcacgcgcattgtgtagagggcagttacataaacaacaatataaggcttttaaatcgataaaaaaaaaaaaaaaattacacccatgtaaaagaagaggcttagggtgattagtggtttttaaaaatagttgaaggttaaattaaaaataataaatatatatatcaaataagataattgtctttattaatcaacaaatcatcatctagtagtgtgagtaaacacaacccttgaggctgccattaagatccccaaagagaacacaactaagacgaagagtgaccacaattaaggcaactttgaaacaatataaaatcatttagaagcctctgctaataggataagcacatgggataaaaagtaattacttggttacctttgtgaatgaccaatcatctcatttcttttccttcacagaggtttcattaacagagttttaataaaatgtcaacagaaaaagagacagagagagcattagcaggtcagatgtgacatacaggattactaagggaaatttgtgagcatatgggatatccagaatggctactaattgatcaacctggcaatacaatgatacacatctgggtattctaagcaacactaaacagtgatactacaggaacaaaaagattgaagtttgcaccacacatgatcaaggtccaaggatatcaatcgggtattcttcttcaaactggtaggaattgttcctgagagtgtgttgttacgaatttgtaaagactgcaactctgccaaggaaaccatggattggggtaagttcccaacaaagtggttgctttgtaaattcacatcctcaagaaatggccaactcatccagcaatcaggtatttctcctgacaaattatttgatgcaagattcagaaattctaattgcattggcttgtgctgatttttacataaaaaatcattcatggattcagagaatgaattacttgaaagatctaacccatacacatcatttgaaagatagggtagtttaccacataactgatttctgcttagatcaatctacattttcaccaaataaataattacctccaaggtcaaggtagatcaaacaaatatatttccaatgcctcatccctcacaactaatgcattttctagcacgtgaaggatgcctaagttcaggagagcagtaactacatgctcttgggtgccagcatcaagtgcatagaggagatcaacaaggcgggggatagcacccgcttccgcaatcaaaataatccccgcacacacacaacaaacaagaaaaacaaaacattgtgctttctagaagtgcttaaaccacatgaaaatatagacaagctaggactaagaaaatgaaagccaaagtaccaaagttttgtattataatttatgacccactatttctttatccttcatttactttttgctgttttagtaatcctgtatgaaatatgaggattatttttaacactacactttacagcagcaacaattttgcagtacaaggttttgtcctgtgctcaaaggattactgaacacaggaaagcatgagccttaagatcaaatcagcttaatgttttggtttagatttgagtgaggggtggttataatattgcaaagacgatacccaatcataattatgttatggttaattggtaacaataagtattagtatgtggtaagccatattttatttaattctgcacttccatggccagtttccatatttcctttaatagtagtagagtcgtaatcctaaaaggattatgacttattcagttattcctacctaaggcagaataaaatattggtctgttattcctacttaagcataacaatccttttttcccagaaaatgaatagcagcataatgcaatcctattgattatttatttcaatcaaaatctatcctgcgtgcaaatcctatgattctagctttgatgtcatggtttattttcttctgcttcacgtttacattttcatcaaatttcattggtttactaacattcacccttaattcggggacacagcaagactaattaaaatttaaatcacagtattactgaaaattaaaagggtacctacttttcacccttcacagcaagcatagcagccatgatgtcactatgtccagcaataaattttgtagctgagtgcatcacaatatctgcagcacaaaaagtactagtcagatatactttgggttgaactaggcaagttgaggtgttcttaataaagaatgggttaagttgatttcctctgctggttatactaactacaagataactccagtcttgggcttaaggtctctcattgagatctatccatagtaagtgaataagatggggccagccctctatagactagaatattgattgaatatgtaacaataacaatagtttggactatatttgtgttgttggaacactggcaaaaaataaataaataaaaaggtctgaggataagtatagtttgtgtgccataatatgtaccttaagatccacagtgtagttatttgttaattccccactatgaacaatgattcgtagttgtgcactagaattatctttgtttaaagggaagtccgccagaagtggttctaaagcccgtaaaacaatggcatgccccaaccacatgcccttatacaaaaattgactgcccattattgcaataattaaatcttctgggccacagcccatattgactcgcaaattatctttctgtaaggccataaatgcttctgcttctaatgtttcgacaggggaaccaggaatgacataaaaatttccagcatcaaatgcagagtaaatcatctgtggaattacataaaaacattaaggtgccatacttaataatgtctaaacatagtgagattttactttgacaagtcagttaacaagttatcatatgttagttaataactataaccataacatttatttattgtagaactaaactcaggataatagtatgttagtaatttagtatgcaatatgaaacgtatttacatcttgtaaatcagacttattcctaaataaatgctgaagatgcagttaacaatgagaatctttaatccatccaaccaaaacagtagcattttctttgtcagtaatatattaagaaacatgccaaagtaaattcacatgaattcagatatactaaagcaaacacaattgcaccatactattttcaatattcaaatattataaggattaatacaaatcattaaaaagacaaacttaaaagatcatgtagcattctttttcactaactgaatataaacataactaaaggataaagaattaatcaagattgtaatctggttatataaaaacaaaaaattatttgactctaattttccaatgagttgcgttgtgtatacctaaaaccagaagtgatagaaaaccaaaatgtagagaagatatataaagctcgaaaagcttaaacagactgtcattttatcagctggagttaccacttggttcagatttttagacatttcaattatattgtgcaaaatgcatagtccaaaagtaaaaattagaataacaatcatactttagccagtctacaatgttgttgcgcttatcacaagttctaatgacagtgacaggaactcttaaatttctccacacattatgccctggaccatctgcaagtgaaaagacctgcaggacattgaaaatatttgagctaaaataaacataatataaataattaaaaaatattgaaaatgatgtggaggcaaacaataacaaggaaaaactcttaaccactaaaacattacttaaacaataaactagactccaacttaaacaatccaaattcaagcaaaacctgcccccagtttatcattaaaaaaatagaaaacatgctgaagtaaaccacatgcacaacctacaaatccagcgtctaactatcctcacaatgagcaacaagaaactctctaaacaaacaccaataagtataaaaaaataaaagataaaagttgaactaaccaatgccaactgaggcttcctgtacccaaaatgctgcactgtgtggttgaagaaatccacatctctaccccccactacctctttttacagtactggatgagccgaagtactaataacacatttctgctaacacttctttattacacattccttgtttattatttttaattattcagttaacaataaaaaatatgttaatacatatatattaaataggaaaaaaatgtacatacaattttataagtgttgtacttgtatgtattattctctaattaaaataaaattttcacattgatagtagtacaaaaaaaaactattttcattacagaactatgtatagtatttatgtaaaactctaattctaattgaacagtaacacatacaacacttatatgtgttagacaaaatttttatgtaaccaattaaacttttacatggagataacaaaaattaattaaatacttcttaatatcaaaaagatctaactcaattaatatatatatatatatgagttattataattttttttagattttttatctcgatctataaataaaaaatattcattactaacttaggaagactattaatgaaacacttacctacctaaccaaccaattaaaccttttttttttatccatatctaaaagcaagacttaccatgatatcatgcgccctcatgctgagatacatgtaaaaagtttactacaaagtcgctatatatttgcttaggtggaaaccacaaactttaacatgcataattcattaatatctatttatatggtctcttgtggacaaacgtttgtgtcattataacaatatggaaagatccaagttagagatcagcgaggtgagagtggaggataatactgatcataagcatgttcatattccaatccacaggttaagagccagaagacttaaccttgcgctaagggttaaaccaaagaaaacctcaaggttagactacactgcatatacttcattcagccattttcttgtacgctttaatttttgacatcattgaaaaaaaagaagccatcttaatactctggacaaaaattactaacttttgtggctttcacattgtatcttttgattttccccagctagctatatttatcatcatccactaatcaagatttattttatgaatacattcttgagaaagaagaacatagaagcatcaataaacaaatgaatcgcttaagtaatgagtattaaacaatttaaaaatgcttttattaaggtttaagttatgttatatgcactacagacatttgtattcagaaaaaatactagtcatttgtaaaacataaataacattgtcagcaacatctatatctttcgatatattattatttttattcttgattgaaattcatacaaaatgtgctaatttaacacaagaatctgtacgggattcatgaaatgaattgagtcttattactatatcatctcatttacctagaaaatttatcataaattcttacaaataaaataatactccattgcacaatatcttgttagcattttttcagttcagtactggaacatcattatgtctttttaactattttttgtagcacatcaactaaaaagaaggaccaagagctggttattgctgcattcccatcgcatgaagtgttcatgtttctgaatcaacaattccttggagcccttcaagttgagtatcaaaacaagaccaaatcgcccttcgagacacacccaattcacatgtggactttcctaacttccatatgcttttacagtgtgattcttgcattcaagatcaacattaaggcttgcagtagtggccactttgcttttatcctcaaacatgttctttttgtcttgggtttgctttcctcagcctccttattgtgcatcttccaaccaggcaagcatttatggtttctctatgtcatagggatatatatggcactaatgctggcttatcacttgctccaaaatcaagtgttgaaggttttgggaactataatgacttcagcttcccagcttcaagactatctaaatttgttttgtggacgcatagggcagtgacggtactcgtacttcctcaatattagaaatgcgcttttttgattgttgatagaaatttattagaatttaagaagttacatgtggatgtaacatgagaaagtattagctggttttttttaatcagcattattaggtagtcttgagtcacactacttgattcatgatccactaatttatatatgacatgtaataaagtgttattaattagttttttttaaagatttaatcatgtgtcacataaaaattgataggaatcatgaaaaggtgataatccaaaatcacctattaatttatcctgtttgatgcctgtgacacaaaatataaccattgtaataaaaagaaccaagtattaaaggagtatttgctaaagtgtgtttaaattacgattggatatttcgaagcaataaaaagaggaacactgttgttggattggagaaaaggcaacttacattctttgattattatgttatattagtataaaatatttgttaactttaacaattaattagagaattttattgatcattttttatgatatattctctttcagttatgtattttttaatccgtaagactctaaatgagatcttatttaaataaatcaagtcaattatcatttgaaacaattacttattgggtcaaatatatatgtttttcctcttttgggtcaaattaatattaaaataacgatattatatagaatgggagttcacgcgcattgtgtagagggcagttacataaacaacaatataaggcttttaaatcgataaaaaaaaaaaaaaattacacccatgtaaaagaagaggcttagggtgattagtggtggtttttaaaaatagttaaaggttaaattaaaaaataataaatatatatatatcaaataagataattgtctttactaaaagttatagataacttcctattatttttatataagggaagtcgtacgtataaaatacaacgtacgtagtaatttttttttttaaatggcaatcttcaagacaaaatagtttagtataaaataactaattcctcttaaaatactaatttgtaggtgttttccccctcccttccgattgcttcccttgaaagtgaagtctgctctatcctatctctccgtgaagagactctttttttatcagatgttgttgtaaaattatatatcaaattagataattttagttataatttatcaatatagataattttgactcaaaaattacccattttagtaaattataatcgcagtcaaaagtcaaaaagtcaaaatcacttattttttgtaaatgaattttcaaaccacttaatccagtatataattttacgaaattatctagttagataaaaaaaaaagtcttgctaagatgtgaaatttggaaaacaccacaataattaaaattatatatttaaatggttttattagtataacatttcaataaaaaaattgaaaaggataacatttcaattaatatatattagattagatcatctttatctcttgccttactttgttttctataatttttatacaaatggctgcctttttaatttcatttcatcagcaaagtacttgcatgtcctccaaagtagtcaatagcatgaatgtatgatgtggttgttttagagagtggaaagggggaaggaaagtaacaagttgctgtttcctctctatttcccccaaagttgtctagaaactttttatttctatgtcaatgtttatgtttctcttaagcactatatatcattgattatataagcacccatttgcaaattctgctctgttctgttaataacttttaactttctaaatttttttgttcctctggatcaacaactttcgactttaaaaatacatcatgttcttttgtttcaatataatgtgacgccatttaaaattatgttttcttttagtcaatactaattttttgagggatgattaaacaaagaatttgatttttttatttaactataaaaataggcatagacgtatgctaaagaatatagtaatgtttacttgactattttagtcataattaaatgtcttaatttatataccttaacacaaaatctcattaagtaaacctaatacataatgtcacattttatgagcatatgaaattttggatagataaaaagaatgtatttgaatataattgttttatagttactcttacaactattatttttatataaaaaatattacttttatttttatggattttagctaataaattctttaggatactttatttttcattcatttatataacgcaagattctcttaacttcaagaaatctatgataataaaaaagaatgattacctaaatgattggtcctattatgattacttgcgcaatgcataaacacaaatataaattagcatgatataaatagtatatattagttttaataatataattttttatactgtcaaattaaaaaaaataagactattttaatataaaaaaacttaatcatcattcctataaaagttgtatattaaatttaaatttaaatataaatatctaataatctcttgacataaaaaataaaagattataaaaaaattaatcactcaaataaatttatccaaatatgattactgatgcgatttgataaatataaatatgaattaatacaatataaataaaatataatttttaaaaaattatactttaaaattactaaaaaaatgaaagatattttaatatataaaaatataaacatcattcatatataaattaaatttgtttttcaattttgttatttgtgttaataatgtcttttaaaattccgtttccttttagtcaatgtctttgtcagtaagtcgtgtaattttctcacaaatggaatggagtcgtatgctcgaaggtggtaatctcttcaccatttaattgaagatattgaataaatgtgtaaaattacttaaattaagtaggcttaaatatatattttttcatataatttagtatgttttcatcttcgtttttattaaaaaaatcattttaatctttgtaaaatgtatttttcaccatttaaagcattttttattattcaaaatgctatgaaacgctttaaggaaaaaaatattttacaaagaccaaaacaaaaagaaaaggaacaaaaatgaaaaaaaaactaaattatagaaagaaaaaattatttaagtcaattaagtttaatcttgtaaaagcaatgtatgctttacaacattttaactatggtaattggtaagtatattattgtcaaaaaaaaaatggtgagtttatattttattaaacagaattcgtgttaattaagagtccaataataaattatggtaaatatgatttttaattagtttttattaaagacattagatttagcatacatgttaatgctaatttctaattggataacagtataaaaatttaaaactatttacactactaattcttgaggaggatgtctttaatgaaatgggattctataaattgtttatcaagtacttgtggatgaaaacattgaaagttgaatatttgtgataattacattttggaaaaaccttgttgtgtctttagattttattaacagttgtgcatggatgcattaccctatccttattttaaccaaattttaagaatggttattttgtccctaaaaaaagaatggttattttgtaatacaaagttaagttaaaagaaaaatatgtcgttatattccatacttacgcaatccaactcctgttttatccatttcaaatcatagatagttaagaccttaatttcgttgggttctttttaaggaaattccgatggtttagtcactacaaattacacataatgtaaatataaatataaatattataatctttatataaatataaatcaaataaaaataatgttaataataaatataaacaacagtaataaaatatagtatattaatactataatgttaagaaaagtataaataaataaaacttcaataataatataatatatagtctaaaatctaaaatattaaaacaatattaaaaattaaagtacacataataataataataataataataataataataataataataataataataataacctttttattgtagaatatgtgaaagttaaaagttaaggaattaaaattaaattaagactaaattaaattaagactaaattaaaataatcttaaaactcaaattatgtaaaacagaaaagtaattatctcttaacaccaataagatagcattaacaatataaaagaattatagagtcatttaatcacaatttattatatatgataaatttattaatttttaaaataattatcttaaaataattaaaaaaattataattagattatagtataacattattttatactatccgtgcatagtcattaaactctaccattaaagtaatattacaataaatatttaaaatatcataatatatttaaaataataataatttattaatatttttatataaaaatatatttatattattattacaatctttcaaatagatgcaatgtaattatgtaaatgcaaaataacactaacaatgaatgagaacaatactaataaataaaatccaaaaatgattgacgtgcagggccataagcattggacgcagttcaagttgccatgcagggcctttggtttgctacatgaatttgacgttgagaagatgaggatgaaagagaaacaagtgttcctaaattttttgagactttggttaaaatgccattctttggcaaattatttgtccaaatgccacggccaccaatgccacggctcttatttcgcagcaggtacaggcggatttcgtggcttgcgcggcatccacttttagccacgtggcaataggccattggtggcctattttggtagaagggtcagcgaaataggtgctgaccgggccagtttcgattggacagcgcagacacgtggcaaaatgttattggatacgtaatttggcatgatttatagcgaattaggtaaatttggtacgtgattcagcgatttaggtaaataaatttggtaaatgatagagcgaattaggtaaataaatttgtctataaatacctgcttgttgaaatcaccagaacgtgctcaaagtcttggttcttgaaaaattttcattctaatttgtagattgtcgtggcaacaaatattttcaaaacacaattttttttagtttttttaatttatgcaaaatgagtgataatagaaatggtttaataaccattgtctatcataatgggagtagatacgttgggcctaacggtcaagtttttgaaggagaaagtaaaatgtttcgtatgccgtcaggatgtagccaccgtgatctgatgaaaatgatttacaggaagttgagattacaacgcggacaatcggtctctcgattgacggctagatgtgcgtcgggcaacccagtgcagtgggttgctgtggatattgtagatgatgatgatgtagtgttagttacagacgcttgcatatcagatggagcaaatccaagatttattgagttgtatgcagaattaagctgtgggggacaatctagcagtcaccgtacggtccaacccgataggtccattgacataaatagagagtcgtcggtgaatccggaagatagagatgtgtcccaatcaccaccaataccaacccaaccaacacaacaaatggatgatgaagaaatgtatatatcgcccccactagcaccagcaactgaagcaatggggaatgaaatggtggcagcccacgacccagtttggcctatggacagttccgaggacgagatggacgaaggtgttgttccagatggtgactcgtcagatacgaacgtagatggtgacttcgagcgtggtttttgtaacaccccgtgtgcacccagtgtgttaacatcattataatatcagaatctcataaaataagttgcggaagcatgtaagaatcgtatttcttgatacattatgtatagcatgtaacagagacataataaagtatcacaatacaactataactagcccttattgatccagatagacaaaactaactaagaaccgggcagataacaaccatatcaatatagatatgacaggagacagaaactacctcactatgtatacgccacagggagcttcaagctcacagatgctaatccaaacagttaccctgcttgactccactggtttctccccagggatctatcctctattctacgcacctgcacataaaccccacacggggtgagataaaatctcagtaagcccagggttcttggaggtcttacctccccctggttcaatatcaaacatttctcccatactaaatattatggatgtctaacaaggcctgtgcccttatctcatataaaactatcagccatctcggctttctcatctcatgtctatatgtattcatcataggcgtcacacatatccagggaataagttctctggaacttagtcccatgcctggggccatcatctgataaatataatttccccaggacctcactgaactctaaaaatgcctgaggaatctctcaactcagggctttcacacacaatgcctgaggaatctctcaactcaggactttcacacacaatgcctgaggaatctctcaactcagggctttcacacacaatgcctgaggaatctctcaactcaggactttcacacacaatgcctgaggaatctctcaactcaggactttcacactgaggacctgaataggatcatccacttaagggcacatctattcaggactcaggcccgagtaggatcatctactgaaaggcacatctactcaggacttgccgcccaatacctgaataggatcatctacttaaaggcacatctactcagggtttacatggacgcctatggattatcccaagggagatcatccacttaagggcacattcccgatggggtccatagtccactattctctggccagagaatgctcatgcaatcataacacacagtatcattatcatcaatcaaaatccaatacagcatacattatgctaatataatcaatacaaagcatgacactctcacagtgtcaatctacatcaataccaatatgccataatggcattccctaaccacacatcataacaccatcacagtgttttactaacataatcataatcatacatcatcaaggtgtctggcatgtcatacagaactatcaacaatataagcataacactctcgcagtgttagcttatcatcaggcatcgaacaccaacacagggttcatttcatcactagaacatcagggtatatctcttatacccaatacagcttaatcctctatcctagtgtttaactacactagctatcacacatacatgtcttatacgcctataagaccaacaatatcatgcctaacactatcacagtgctaggatcctcattaacagtcatataatgatatctaatcagaactcagaacattaacctagtgttcatattcaccgtataacacataattcagtaaataatgacccccaagcagaggaatcaccccaagaaacactgaacttacctggtatgaccatgctttatcctctatcttcatctggctagtccatgctgctgacactgtcgtgccttgtcctattcaaatcatgcagcacagtcacatcagaacactataccaggtatctaacaacggtactcgaccgttgaaatgaaaggaagcctgattcttcccctacaatccctcaatcgtctatcttaaggttatcagcctaatcactgtataggcccccttacaggtcctcaacaggattattctcagcctgaccatggtcttagagtcttggtaagactctgcatcagtcaatttaatggtctattcattcataattcctcaaataccaaacatggccacatcaaacatattaatacatattcaccgtttatttggccttatgaataacttttgtaaaggtatttaagttaattcaggccataacatagctcattcacacccacttctctcgtcccagagccaaactcaaacttcatcacaatctcagattcaacatgccatgtggctcagaacaacctcctgactacatctccctaaagaaccgaagcctaattccagccctatcacaatttggttactattcaccccattacccaaatcacaaattaaacggtgaaagtcgagtttcttacctcaaaactgttgaagaaggccggagaatcccttctcccagctccaacatccaagaagcgccttcttctctcctcaagctcaactttctctctaaagaacctcaggaattggggtttctctcaaatcttggctggaacttagctctcacaaggttctctcatgtttattagtgatttggaggtgtttaaatgaggtgtgatgaagttatagagcttcccatgcccatcaatggctgcctgggccagaggaagaaggagaaagggggttttcccccaaaaatcgcgtagaatggccttttataggcctctcccgtgcctcccacgcttccagcgtggcttcccacgctccaggcgtgggtttccagccaaaaatggctttctggagcacttcccacactccaggcgtggattcccacaccccaggcgtggcactccagcaaaaaatcactttctggagcagttcccacgctccaggcgtgggttcccacgcttccagcgtggagctacagtactgctacagtactgctacagtaactcttttttttttttttaacttgggttattatagttttccaattccttctccgggcaatgtcagaatgcaagacccaatgggtcaaggtatggatgcacaatattttgttatgcagtagttattaaattattgtaggttgaataaaaactattgtaggtataatagaaattagtgtaggtttaataataaggtgatgaataaaagttgtaaaaacttttatgcaattattcaattatttaggaaaaagtgttataaatataagtgtgagaactaagatgattaatttatataattaatgatcgaaaagtttttcattcacagtgtttcatatgtctaatgatttaggagacgacatcgttccattttggtcggatgtaatgcattacacacatgttaattgggcatacacagagcagcagtctggtgatatggaaggaggtcaaatacctaactggcagatgggtcaaccattatataagaatcaggtgtttgagaccaaacgcgatgtgcaattggctataaaacaatattgtatggctgatcatcgcactaccgtagtcgaaaaaagtgatacgaaaagactgataatggtttgcgaaaatcattttgacagttgtccgtggaggatcagggcacatcaaaaaaagggtggcactgaatggattgtaggcatatggaataacgaacacacatgcgttggtcagaatctttctcaagatcacaagcaacttaattcagatttcatatgttccatgatcctaggtacgtatatacattaaattgaagtttggttcttgtattagttaaaattgggttagttcaagaaaggatagcatcaatgctcggatttcacatatcatacacgaaggcatggaaggcaaaacaaaaggccattgtgaaggttttcggagattgggatgagtcgtatgcatttttgccaaggtggttggcatacatgataaattttgctcctgggtctgcatacaagctggatttgcatgaccatttcattgatgggctactagaccgaagtgccaaggtgtttaacagggtgttctggactttcaaacagtgttgcgatgctttcaattattgcaaaccagttataagcatcgacggaacccatttatatggcaaatatcggggaacactgcttattgcaacatcagttgacggaaacaattatgtccttccaattgcatttgcgattgtttccagagagaatatcgacaattggtcatggtttttggcactgattcgcatacacgttacccagaaagagagaatttgtcttatttcagacaggcatgctggcataattgctgctgtaaacaatgttgatttgggctggcatccaccacgggcgtaccatgtttattgcattcgtcacctggctagtaattttaatcacaagttttcgaatgtcatcctgaagaaacaattgaaaaaattaggtatgtttgtccgatatgtagggcaatgttattatatgcaattattccgttgaagaaattaggtatgacattgtgtttgtttttgcagcctatacaacatcgcgcctagattttgatgtgggactagaaaaatttaaagagtcaagccctcaaatagcagcatgggttgataatatccccaaggagaagtggagtataccctatgatgaagagggaagaaggtttggtcacatgacaaccaatctttctgagtgctttaaccatgtgctcaaaggagccagaagccttcctattacgtcccttgtgcggttcacatacgctcgcttagtagcatactttgtcgcacatggtgaagaggcccaccaggagatggcaagaggcaatcatttctccaaggtagcatggcaaaaatatacgaggatggttgaaaaatcggcaacgcactacgtcacttgttttgactcagttaggacgagatttgaggttcaagagacgtacaacatacggactcatactggggggaaaaaatggtctgtgtcgttagctgaacgaaactgtcaatgtggtgagttcactgcttataggtttccgtgtattcatgttattgcagcttgtcgatcaacacaccacgatcccagacaatatgttgaccctgtatatagtgccgcgtatcaatgtcaagtgtatgcaccacagtggtatccaattggaaatgaggacttcataccaccagctgcaccacccattgtgataccagatttgacgctgaaaaggaaaaaaggaagaccaaatagtacgcgcatacgcaacgagatggattcgtgtgaagggtcaacaactcgcaccagatgtagttattgtaaagttgtgggtcacaataggcgtaattgtccttcagtcaaccaaccgcattgatgtattagttgataatcatgatgtactatgttcaaattaaacaataaacattacaaataaaattaagcagtgtccattagcatgcaataaacattaaactaaaatattgttcgatagagtcaatcataataatgcgtaaacacaacaacatattaaaatttaaggtaagaacaggtaaataaaaaaacaactcagtcatgctgttggtggtcttcatggtatcctccacaacggctgatgttgtgctcgtacggtgatagattacatcgaaatcgtgcttccctaagcggatttcgtcgaatgatacgatgggggacaatgtcaccaccatcatcgtcgtcgtcatctccatcattcaagaccgccagtatgtcagctgtcgagtacgacacgaaagtaagggaatgtacatccagatgcggatgtggcgtaggggtagacatcgctgcatcctcatatgacattggagcattgggcctataacaatctgcataactaggaccagatgaactaggtccagctgaactaccaccagctgaactgggaccagctgaactaggaccagctgaactaggtcccgcaaaactaggcccagctgcatacataggatgtggatattgtaatccaccctgcgccatcgacggtacggtaaaccagggagggtactgtgaaccaggtacttccatgtggtgaccaccaatattgctgagaaagtcccgccaggtacccaggtgcccagaacatgccagaaggacgtggaggaagaggcgataacacaacaggtgtgtccgcaatcgggggagtactgtgatgtagcggtaaccccttgtggcgcgcacgccgatttctgcgaacatgtggaggaggggcctcagtctgatgaactacaggtggtgctgtcgcatctccagcatctgttaatctttctacatcatcgcatgcggacaacgctcgaaccgcctcgtcatagatctgggtcatgttaaatgacccctgagcctcaggggaagtcatgtgaacaaccgtctcgacccgatccgcctgcacatgatgtataattagtcaattaaaaattacattaacaaccaataaatgtcataatatgaatttgcgtaccacatgggcatgtaacgcagctctgcgtgtcatccaccgacgggtaacagagtaataccactgcatgtactcgctgttaaccgataggtagtcgtctctccgcataggctgcacattctgcacaacaaggccatctcatgctacccattgggatatgaaaaatgcgtgccgcacagtccaatcgacctccgtcttacccgtgatgttgatcgtgaggagcacactacagtctatcgggtcttctggaatatgctgatcaaacccaaactgacgtagaactctatccggttgctgatatacaacaacctcataacaaataagcggacaaaccgccaaccatctacgagccgcgtcagccttcggtggatgaacaatgtcgacaatgtcgtatggcctccagcgtatgttcctacggcgcatcacatcaatatggtaccgatatctacgtatgtatgtaaacacagtttgtcgcatcgtgtatacgttaaacctgttacaaaacagttcagcattaacaatatacaaccataatataaagcactgtagttaaaactatcaaacaaaatcggtcaatacctatggccatagatctccacatctaattcttgttgatcctgcagataggaagcgcaggagaaatcgtggggaatcgcgtccaaacccacagctgcaacaacaaagcacagccacccatctcacgacccgatggatgggtagccctacacaactccctatataagtatgcaaggactgcagcaccccaactgaatgttccagtgcgttggaaatcatccaggtgtaacaagtagcgagcggggacaaagctggaagcggtgtcaacaaataacataccgcctaagatacgtaatatcaatgcacgtgtgtatcttcgacggcctatttcagtgccggcatggaccgcataatcaccaaactggtcccgtaaatagtgaagtaccaacaaaccgccatgcaaatctcgacgagcaggcggctcaatccctaataaatcaccaataatagcacgcaagttgtgtcgtccgtgacgcccagacacaacatgcccgtcagtcggtaaccccaaaagatgatgcacatcctctagcgtgattgttacctcacccatcggcatatgaaatgtacgcgtctccggccgccaacgttcaataacggcagacacaaggtgatgatcgatctgaacaaagaattttacgacacaagtttcatctacattgcaatacattgaaaacatcaaattgcatacttgtcatttgtcttcatatatttacctcgtggttgtgcaggtgcgcaacgtgataaaatcctgcctgatgaagccatggttggatctcgtcaggtataccctggtgatcgtgtgtcgcggcgatcctaacattaataacacgatcccgcatcgatgaatcagcctaggaattccacacataagtggaaatatgcttctcctgtagtgtaaggagactacgcacggatggacctggatcaaccacactcagtggtgactcagatgatgaggtggatggaacatgttcatcgtgatccatgactgtatgtcagttgtttaaaaaaaataaattccattaattaatgtacattgatatcaaaaacattcgatatattgacgcgttgtaattcaatgtttcaattaaacctatgttgttgtaattgttaaacctaacatcattttaaaggatggtgaaggtcaacggcttcagggtgacaacagatagggaaggaagacagacggagatgtttatgaagaaggaatccggcaagcattattcaagtctggcgacgaattttggatgttcgggttttacggaaagacagaacttttggtacttgaaaatgtggcatgggtcttcagtaagttccatttgtgtgtgctgggacatgacggttcaccctgatccctgaaaccccaacgtccaaaattcctcgccaaactcgaaatatgttcccccgattcgttcaccgtaaacacctttcggtctgtcttccttccgtattcgtcgttcgctcaagcccttgcccttcaccatccttaaattattatactttaattattataccttcaattcatcatatatttaattaataatttttaaatttgtaataattatttttattatacgtataattacttttttttaaatgaactcttcaccattctttaattattaaatcattacttatttaatcttaacttgtaattattattaatttataatttttatatttatcaaatcaaaactttaattataattttaactacatcatatatttaattattaattttcaaatttttattaattatttttattatacttataattatttatattaaattatttctttagttactctatttattacatcaaatcttaaattattatactttaattattatattttcaatttaacctttaattattaaatattaacttgttatttttattacatcaatacgtatcaattttattatatcttcaaatatttttatattaaattaaatgtttacttataattcttattaaatcaaatattgaattaaacaatttttttacttattatttttattaaataaaatcatatgtttaaatttttgtcattaaaaaatcatgtttaattttatacctttaattttttttaaattaaatcaaatctttaatcaaatcattactttttgaccttgcaatccatcattgtatgtcaaagttttataaaaaaattctataaattaatgcatgcaaaatttaaaattatttagttttattacatcaatacgtattaattttactatatcaacaaatattattaatattaaattaaatatttcaatataattcttattatatcaaatccttaagtaaacaattcttgacttattatttttattaaataaaaactttatttaaatatttgatataaacattatctcacaatatttttttaactaaataaatttctgaaacttaaaacttataatctaatatattattcctacattttatcctatattttttttaatctttcctacaaaaataataattataaactaacaatttcatcatctaacctaacatttataaaatatattattgaatacctattactatttacatataaaatatattaaccatgcaattaataattataaataaacaataaaaatcatctaacctaatgtttaaaataaacctttaatctaatattttaaatcttcaactacaatattatctaatatctaactctatttaaataaaaaatatattcaatatttaaaatataaacaaaataaattaaaaataatataaactaacctaaaatatattattgaatatctgtcactatctacatataaaatatattaaccatgcaattaataattataaacaaacaataacaaatcatttaacctaatgtttaaaataaacctttaatctaatattttaaatcttcaactacaatattatctaatatctaagtctatttaaataaaaaaatatattcagtatttaaaatataaacaaaattaattaaaaataatataaactaaccttatcagtagtatgcagggagcaagggagcaaaatgagaggttagggagcaagattcagatacgagagaggagaaatttttttttacgaaagtgacaggggacaacacgtttaaatagtgggccaagcatacctaaatcgcaggttcctctaccaaattagccaaaaccgctggtcccaccaccaaattaggcctccacgtcagcgatccccaccttattcgcccaagccgcctgcggtttacatgctgcacctaattcgtccacggaagcagcgagttagcatatttcgcccacgttggctgcgaattagccccgtcagctggccgtcccattaagccaatgcatggctgacacgtggcggtggtatttagcccatggatgctacgatttcgacaccgtggcatttcggcaaattttttgatggtcgtggcagattgacaaattattttctccattgtggcattttgactgttgttccaaatttttttaagttaaacatccaaattactaaagtgtttctaaattaaatatattataacaaaggaaatgtttgggtttcttttttcaaaaattttggtgtaaaatactaatatactctaactgaaaaaaggatgaaggtcagaaggtatattaacaatataactttttgatagaacactgtaaatcaatttcttggtgattgtctcaaaccatatagtgacttctgaagatgacaaactttgccatttgctggagatgagaagccaggaggaacacacatgtacacttcttcatgcaagtctccatgtagaaaggcattattaacatctagttgatggagctcccattttttagcagctgccactgccaagaaagtacgcacacttatcattttggcaacaggtgcaaagatttcatcaaaatcttctccctcaatttggttattcccagcgatcacaagtcgtgctttgaagcgttcaattgttccatctgacttgtatttgatgcgatatacccacttgcagggaagagctcttttgcctggaggaagagtagtgagagcccatgtatgattattttcaagtgcttcaatttctgttttcatcgcttcacaccaacgaggatcaagaactgcttctttaaaattacgaggttcagtacctgcatttactacagcaagaaaggctctgtgcttggccgaaaagttagtataaccaacatagtgattaagaggatagggactacctgaggctcgatcaactgacttgtttgcactagagtgtatgtgtgcatgcactgtattgcactgatagtctttaagataggacggtgcccgccgttcacgtcgttcacaagaaggcataatgctactctctgtttggggccctagttgttggtgtgcttcaggttgagatgtatttatgctccccctgtcttccatacttactgatggtgctgagtcagtaatatgaggcatgtctgtgatagattcttcatgtggttgttctggaacaacatcctccaccacaacgtgttcatctaaatttgttgagaaagatggataataacttggtagagctactggttgttgtgcagatgctccagttggatcaggaatagaggggaacacatcctcgtagaaaactacatcacgagaaacaaatatattatgtgactgcaagtcaaatagtttccacccttttttattagtaggatagccgaggaacaaacatttgcgggaacgagcttcaaacttgtcagattgttttggattttggtgcgcataacataaacatccaaacactctcagatggttgtatttaggtggtgaaccaaacaacaactcatgaggtgtttttccattatgaagagctgtaggcgttcgattcagaagatgggcagcagtcaaaatgcatttccccaaaaactcaatgggaaggttagcttggaaacgtaatgctcttgcaacgttaagtatatgtttgtgctttcgttcaacatgcccattttgttgaggtgtatacgtacaagatttttgatgcaggatgccaagctcattatacaaattggttagaagtttatgctggaattccatcccgttatctatgcacaaaatttttacacaacttccaaattgatttcggatcatggcaataaagcttttaatcagcagtggtgtttcaatctttttcgccattaaataaatccacacagctcgattgaaatcatcaactagtgtcagaaagcaatgtgcacctgtgaatgatgtcttcctatacggtccctatatgtcacaatgtatcatatcaaaaggttttgcactttaatggtcactgagagaaaatgaactacgagtttgttttgccctgtgacaaacattacaatttatacaatctttattcttacgcttatgctgagagatgacaggaagaaacgataaacactgacttgatggatgtccaagcctttgaggccaaagttccacagattcagtttattgtaaagtaagtgcacttgcttgacgtgcttcatacacatacactccactgctttgattacccagtccaatacaagtcctcaagtctgggtcctgcaagaaacattgtgtgttagtaaacacaatgtcctatttacttgatcgtagaagctgattaacagaaataagtttgcattgtaagttaggtacgtaaagcacgtcagtgattgaaaatttgtagtcaaacattatttttccttgctttttagcacatgtttttgttccatttggcaacccaatgatgactagatctatatttgtaacatcggtcataatatcgagcctgctcgtcatatgccttgaggctccactatcaatcaaccaagaaagaggtaaggtatggttaccagataaattagcagcactagaatgctttatgtccaccaaggatagaagccattccacaacttcaggtgttaaggctgttagagacttagaaatattttgtttatcaccatatcgacctgcattagcttgaataaactggtttccacagctaccacctctaataggtttgtttggaaaaccatgtagcagataacatttgttgacgtggtgatttgattatccacagtgtgaatacaaatgaaagtacagtagtgctattagataaaggagtcacaggttatcatggaccttgtgctctgataccataataaaatatgaaagtatggtatgaatcttcacacgttttattaatcatcaaaagttgccttatataggcattgtacaaactgacgtaaatataaaagaataaagaataaaaacagaaaacaaaactaacaaatcttatcctatctagagtttgttatctcataatacaaatataaacttatcttataaggtttgttatcttcatatcctaactaatagatttaatctccaacacactgccaaattttcttttttggccaattacttttcttctttcgaaactattgttttctcaattgtcacacttgatttttctacatttcatattttcttttctcaattgcttgtaagttactaagtttaaaattatctttttttcttttcagatttcatattacactaatcaattttttttcattcttatattttggcggaatttgtttctataatctttgtttgatatccaacatatgagtgtctatctataatctttgtttgaaggaaaagaaaaagataagaataatttttttcctaattcttgtacccattatttattttatattcatgaaattgtttaacattataaagttgatgttgcttttcattcaaaattgaaaaatctatcaacaaatctttagttatgacaagttttggtgaaaacaagaaagcatttttatttatcctttgattgattgtctaatccatttggtattgactcttcctatctcaattgtcacaatttagagatcatttttaactataaaaattgtcaaaaataggcttaaaaataagatcaaaaatgaaaatctagctaattgtttgattatatacattgaaagaatgattgctgaaaaatttgacacattgtattgttgatgaactttatgatacgaaggaacgacatgcacgatttaaataaaaaggtatgatacatttaaacttttagtatattataatttgaattttaatgaatatttattattaataaatagtccatttgattgacttttggattagtctttatatataattgaaatgcacaagttaataattaaaatattagttaaattgtaatttttctcctaatttttttagatttatgattttggtcccctggtaaattattaactaataattatgattaatataattattaagttaattataaattaaataaaaattattaatcattagaactttgataaaagatcattactcataatataatgctagaagtggcgtgtaacaatagaggtgaaaaagatttttaatgaggagaggaggaatataatattgtaaaagattaggatttataatattttattaatttttaataattaatatttttaatttataattaacttagtaactctattaatcataatttataatgttgtaaaagtttagaatttataatattttattaatttttaataattaatattttaatttataattaacttaataactttattaattataatgacttgttaataatttacaagaggacaaaaattgtcaatttttaaaattaggaggatcacttattataattaaaaataagaaaaaccaaaatcttaaattaaaaaaattagaaaaatcaagattataatttaacctaacaaatttaatatatataatgtatgcactacttaaagtatgtttaacaatattcatttctcataatttttagttatataaaataaacataatgttgaaaggaacattcataacaattataagttttaaattaaatatatttttaatcaatctaatttagtatttcttttatttgtaattcttttaaattcttacaaattatatttattaccattaatcattatcgaagtattgtgaaactcgatctagtatgattggtggaacaagttgaatcgagattaaatgacctaatcaagttaatttcacaattagattggttatataattaattcagaatacctcaatcaaattcgacaagttaacttaacatatcttacttaaattgattcaacttaatcggatttacatattttatttttataagaaaatttaaatttttttaaattttaaattattatcaattattattttatattttaaaatataattaactttttcttcatcaaataaataatattaatattatatatatatttaaatttttaatatatatcagatcaaactacttcaattcttaatttacggactaaatcattaatctgttacctcaagcggatcaatcacgagtttcacaagtattgtttgtctttgtttattttaatccacaccacatcgagtaaaacctgataacctataacctcaggaggagaatgttcccctgaatccgaagcccgtgctctacccagcgacttcgccagaaggtcactctccattttctttcttttcattccctttctggttttcttttcgctctgaatttgagtattttttttccgtatcttttgttgctccctgtttggttgatcggattttgttagtttgctttcacctattgttggaattaggctagtgattgcaaaagggctattagggcatactctaatagcctttttagttgtaaaatttaaggcctgcaatatgtgtgaattgttgctgctgagggaattatgaatataatttttgtttatttaccaatttttaatttgatgaaaaaataaattgcaataactcaatgaaaaagggtattgaagtttaactaaactggttgctatgacgatgaagtttggttctgatgatactctgagcatttaactcacgtttgtgtgttttagatactcccgtattctggaaatgtatatgcttttacatattcagctttgtttcagtttatattagtttgtttgggttcatgttagatcatccagatgatggcataagaaagccaagaagacggtccttttttcttttgacaattttatccttgtcatttaggtatctctgccaaatggaatataaacgcattgatggggtaataatattttgagtatgttaataaacggtaatgttttattttttatttgtatacacttggagctttttgttgccatgcaacctatgtggttgacctcacctgatgagataagggttttattgttgattattgtccaattggatctatttattaactttgttagtgcttatgagattaccctcaagtggcttttttggataaggaatgttcgaacattcttggggaaatgacatgggaataaagtttttcatgttttttcaaagagagagagagagagagaaaagaaaccttctgggaagaagaaacatgttgctgctcatttccagtaaagcagtttagttaagaatgaaagatttcttataccaaatgccacctaaataatggatatttggaaacagaatgaatacactggtggcataaatcccagtaagtttaaactttgaacgtctgaaatcttcaatttagagaattctagctgacttaaattcacttttcatttgccaaattgtgcttcaagttcagtagatttggtttgctgttggcaagaaaatgttttatgacgtgaactgttttcatggaaaaatagtcaactatatttttatcttacttgaatagaaatttttcagttaactaaattgtttttccagctgactaaaatttccgagaaactaaattaaaatcgtagagtttatagctgccttgtttttagttctttctgtgctgactagttttgtatttcattatttcagcttctgctttggaatttacgctgagtgatttgttaagaaaatgaagaaactagctaactaattttagtacagctacacccatttcatatagaagatttttcccttttggttttctttgtttggctttgcaaataacaccattttttaaaccttcaccactttatatgactctggaatctgcctaagtttctgtttttcacctggattgtatctgttacacttggtatgtcttccactgtttcctttttgcttgttcggagttgatgagaaaagaaaatgaaagtgaagcttaaaatagactcaaattttagttttatcttattaggggatatctggtgtaactgaagatgtcccaatctcattttggagaacagtactatttgtgtgccactttctggattgattaaccatcttaggtagcagaggtcctgtaatttacttctttcatgtctcttgaataactcttttatttgtttttcatttttcctttaaaattgttagacttactcgcttcttaaggtagcatccaagttgatgatgcatgctttcttatcacattactctctctctccaacagtccacaatttcttgatttttggaggttaacagtgtttatattcaacactttgctatttcttaacttcaagtgcaagagaacaaagagcataaaatcctttagagtgtcagcagtcaagaatgcatacaggaatggcttcgttaactcaactccattataaagtacatgcctccactttcagaagggtgcattctagaagccaaggattattgaaatctggaaaactatcccaactccaaggatccgcctttcctagtattcacattaatcaatcctgcatatgctgcacaaagtttactccatgggagtcatcacctgtcacatatgctcctactgataatcaaagtgatactttgttgccgcaaaatgccaatatatttgaaactcttgaacctagtaaaacagctgactcatcaataacaaatgctggaggggttgtagagacagaatctcagccaggcctgcagcttcaggttttcaaatggccattgtggcttttgggcccttctgttctcctagcaactggcatggtcccaacattgtggttaccgatatcatcaatctttctcggccccaatatagccagcctactttccttaattggacttgattgcatatttaacctcggtgcaaccctttttctcctcatggctgatgcttgttcacaaccaaagtctccaacacaagactgcaaaagcaaggctcccttcagttaccaattctggaacattgttgcaactcttaccggttttgttatcccactgttgatgatgtttggatctcagaagggttttctccaacctcaactacctttcatcccgtttgcagttctactcggtccctatcttcttcttttgtctgtacagtttctgaccgagatgttgacttggcattggcaatcaccagtctggcttgttacccctgtcatttatgagtcttaccgtgtcttgcagctaatgaggggattaaagcttggggttgaactcagtgcaccagcatgggtgatgcacacaattagggggctggtttgctggtgggtgctaattctcggtctgcagttgatgagggttgcttggtttgctggcttagctgcacgagctcgtaagcagcaattgtcttctgatacttctagtgttaatggtgattagtgattagtgattagtacattgtaaaaatattctgaaagagacagattatagaataagtagatgttgtttattataggtatggatgttttccatcccatccatataccatagtgatagtggtacacatccaatagatatatacacaagtaaattgcatacaagacttacttcatcactgggctttatgctgtatcaatggttttgtctgtgttatcttcaagttgtgaacaaagtggtttatctgtttttacctcaacttatgaagatggaaaaattatatagtggttggttcaaggaaaagtttatggatttattatttttgataaattacaggtaataagataagttatattaattacttgttcttttgtttttttccagatagaatgtacaatatcgataatgatgatatctcggttgagtcgaggctcgtattcctttcattcataaatgataatcagtttagtctgtttttgtttttttgggtatccttgtcattctttctgctcgtttcacccttgatctgcttcttcatctgcgtcttgataaataacagtgtatagaactagtgtgattttttattttgtcttaaatgtgtgaatacaaagattcatgtataaataggagggtcaagaaactgtgaactatgaattgtagcttagttgtttttgtgaacagttagaaggaaaatttgtgttttacacacttcaaaactcatatatcttcaaatttttttcaaaggatttactttttactttggtattatactgaattattcattgtaatgcccaactgaaacttgcttttgttaggctaatgtaacagtgtaagtgcttgtttgattcacttcttacttttttgtattaattttttttttgaataattctacactattagacaatcaactcatctaaattctattaagttttaaaaattgtttgcagaataagtgtttaaaaaaaatagaaaagtgaaatatatttttagttcaaatacctaggagacaaacttttagaaaagagacatatggtcatgagacaaacactaccaaatatatagaagggaaagctaaattttagaatataaaaaaaaaaaaaaaattcaataaacaaagcttaaattttttacttctttttttcgggtcaacattgtaaggttatgtttggttttctttcaaaaatacgcttgtacggttatacttgatttgaaaccgagttccaattgaaagcaatatggttgtttatgcaaattcactttgcaaaacaaaattcattcaaatttaagttgacaaactttttaatctaaacatactttaaatttgtcaaatttggtttatggacggtggtttagtaaaaagtcccaagtgaagttatatttatattagtcataattcagagacacatgttccttaattgactgggtaaaatgcaagtattttattgtcccctatcttaattagcaatggactgacgcaacgcataagttttgcatatgacttggtgtgaagagttcctaaaagatgtgtaaagatagaaaaaacaaaaaagaaggaaaaaaacaagaaggaaaagcttcagggtccaaatcatatacattgctttcgtgggtgaggaaaataataaaatattgaagaagaaaatgcgaaactgaatggaaacaaagtgaatttacagttgtctgtgttatgtggtcctataaacaacatcagcaacagcatagcaagatgctaagaaacccaacatgaatttatcacattcatcatgcgtaaacgtgtgatttttgaagcacaaagaagcatggattaaatgcaggcccgatccaataataagtgaagactaaagtaaaatttaagaaaaatattttattttaaatatgataaaaatataataggtctttttttttcaacataggtggacttcttgttaacatatcagacatttttactttgtaaaatctaataataaataatgcttttttgttaatgaacctaaagcttgatatttagttattttatccttaggctaaaaatgttaaaatgttaacatttgagagaataaaatcctggtgggaagaaggatgaaaaaaaaaagtcataattgtgttagaccaagaatcgaaacttgattctgattttattttaatgcaattagttgaagaacggaataaagtcatttacaatcatttttcaaatggtcaaactcaacatagttgtttatattgtcaactttttatcacaaatttggtattgaaatatgtacaaagcatttacaatcatttaatcaatcatatttttttatattgaattttgtcacaaccacagggcaacggctcaaatatgttgactaagtagtgaaagaaacaaaaataaatattaattaatatctcaatgacactaattaataaattaaaattaaaatattttaattaaaaaatatatttagtgtcattaatatatttattgtgtgctataatttttagtattattactatattactatacaaatcattccaagtacttgcgggttccttaaaccattcatgggaaattaattaatagctcggttgttaattatatttttatcaaatgtggataattatactttgataaacgcaaatatatttcgataaaagaaaagaagttaattaatgttcttttggtacgattacaaagtttctaaatcattattcattagatggcatctaaggtacaccacacatgttgagaacaccattaaggacagtagttgaatatcagggatagcattgacatctacaactcacataacaggtccggtacgttattttattaaatatcccaagccccttcaatcaatagccgtcatacagttattttcagggctcaatattttcttgaaaattccacttttgagtaactttgttattgggttgggctttctccttccatgctatctcagacccattgaggattctaaaaacctaaacctatttcaccattataaatttattagttgagggtggagacaagagaagagagagatttcgatagcctcaaatgacattcttgagagcacgtttaagtaagtcttatgttttgcatttgagaaatctctagagagatgtctaagtgtgatctctttagagaagtttgaatatcactatacttggtaatgtttgattgtatctctagtgaaaggttagagaagtttgactcttgtaacccattattattatagtggaagtttgattttagaccagtgtcccgtggatttttacttcttcacattaaggaagattttgtcacattaaacaaattgattgtgttattctctatctctattctcttgcattttattattttacttccacaatctatttgagggtccttcttaacccaatagtggtatcaaagcccgagttcgatgggttctgaaagagacgagatgaagactagtagcataactcatgacggagacatgttcaagctaaccacggacaacttcacttattggagaccgatgatggaagatcatctctactgcaaagatctatatgagcccaatgtccttgacaagaaacatgcaggaaaaaacgataaggaatgggagattctaagtcgtaaggtggtagctacaataagaaaatatattgacaaaagcctctttgagcacgtgtctgagtttacaaacccgtacaagttgtggaacaagctggaatccatgattcagaagaagactctcaggaacaaagcacacctagttcgtcgacttgtgaagctggaatacaaggtggcatgagcatgattgaacacctcaacacctacaaaggtattgtgaaccagttgtccaaagtcgatatgaagattgatgacgagatgcaggctttattgctattgagttcgctaccagaaagttgggatactacggtagtgacattgagcaattcggttcctgatggaaaattgacgatggatgttgtgactgatagtctcctgaatgaagaagtcaggagaagagaacaaggtgtaaccaacacgtatgaggctaatgttactgagaatagaagtaaatctgactttcgaggtcgtagtaagagctggggtcgtggtggacgagataagtccagaggttggtcaaggctaaagtatgaactgaagtgcctctactgtgggaagtccggacataagaagattgactgttggattctgtagaaagatgagcagcacgacaatgtgaagtcagattagattgtttcaaagaagaaagaatacaagaacaccactgcggtggttgccagtgctgaagtcgagatatttctactcggaaaagataattttttgaatgttgcctatgatgattgcgcctggattgttgattcaggtgcctatgttcatgttactcctcagaaaagtttttttctcatcatacataagtggcaactttggagttgtgaagatggaaaatcaggtgaccagcaaaattgttggtgtcagtgatgtaaccttgaccacgaatatcaggtgccgacttgtgttgaaagatgtaaggcatgtacctgacatgcgtttgaatctaattttggttggcaagctagatgatgtcgggttagtgaactattttggaggatgtagatggaaattagccaagggaaacttggtgatggctcgaggtaaaaaggaaggctccttgtatgtaatgcaaggaaagataaatggtggagaagccaactcaattcatgatggacctagcttggagttgtggcacaagcgtctcagccacatgagtgagaaagggctccagattttgaagaaaaaggagctattgaccaggttgaaaggccaagcgctggagagttgcacgcactgcctagctggaaagcagcattgagtttcgtttgtgagaccgaatcaacccagacgatgcaagaacattatttacctcgtccatactaatgtttgctccatgtctaagagatcacttggtggagctcaatattttgtttctttcattaataaccattcctgcaaagtgtgggtttatttgttgaagactaaagactaggtactccaatcattcaaagaatttcatgctatggtggaaagggagactgacaagaaattgaagttggtcagatctgacaatggtggtgagtattgtggtccatttgatgcttactgtagaaaagctgggatctgacttgagaagatgcccccaagactccgcaactgaatggacttgctgagaggatgtaccaaattattgaagagaaggtccgaagtatgttatccaatgtcgggttgccaaaatcattctaaggagaagctgtcaagactgctgttaatttgatcaacctctcaccatcacgaccacttgaagaagaaatccgtgaagcagtctggaccaatcgaaaaataacttacgatcacctgaaggtgtttggatgccgagctttcgtacatatccctaaagatgaaagggcgaagcttaatgcaaaaacgaaggaatgcatttatctcggatcgtcaaaaaccgagttcgagttcagactttaggatccaatcaataagaagatagtgagaagccagaatgtgattttcatgaagatgagaccatttatgacatctcgaagcctaaagtccaggttactgtctgacaagaggaactcgacccttttgttagagctgaagcagggggagaaatcaatgaagaaaattatgaagaacagaatggccagcaacaagctgatgaggaccgagatattgaggtccgggttgatgatgagatccgggatgagaattatgaacctggttctcaagctgctgaaggataacaaccgaaataccccactaaagaaagaagaccttctacaaggtacccatctgatgaatacaccgtcattgctgaagacggtgagtctcaaagttatgatgaggccataacgagctcagaaaaaagatcgtgaagaagagatttatatggagcaacctgaagggttccaagctctaggacaagaaaagtcagtctgccatttgaagaagagtctttgtggattgaaacaagcatgccagcagtggtacaagaaatttgaattctttatgaatgaccacaagttcataaagactgaggttgaccactgcgtatttgtgaagaggtataagactgacgactttctgatcccgttgttatatgttcatgatatgttgattgtagggcaagataagatgaaaatttccaccttgaagaaggtgttgagctcgtccttcgaaatgaaggacctcggccctgcaaagcagattctcggaatcaaaataattcgggatatggtgaaagatggatagctcgcacttggcaaagtgcatattgaccagaattggtctgacatgatgactgagccgataccagtaaggaaatttgaagattgttgtgaaggtattgggctattgtgaacccgtcgcattgaagatgccaggttgtcgcattgaagaagccaggtttactgatgaacccagagtttttgtgaagatggtgggctgcaggtgaactcggcacattgaaaccgaaaggtgttttgggatgtttatctgccgcattgaagtcgaaaggggagaattgttgggttgggtttccttctttaatgctagcccaggcccgttgaggattctaaaaccctaaacctactccaccactataaattcattagttgagggtggagacaatagacaggagaagagagagatttcgatagcctcaagtgacattcttgagagcacgtttgaacaagttttgtgctttgcatttgagagatctctagagagacgtctgagtgtgacctttttagagaagtttgaataccaccatacttggtgatgtttgattgtatctctagtgaaaggctggggaagtttgactcttgtaatccattattattattattattatagtggaagtttaattctgaaccagtatcccgtgaatttttacttcttcacattgagaaaggttttcccacgttaaacaaattgattgtattcttttctatctctgttctcttgcatttattgttttgcttccgtaatctatttgagggtccttcttggcccaacacttgtatgatagtgaaactactaagctagtattcgtgactctttatgcttacttaaatttgatagtgttttcctttaaaaaaattgtcatggatcaaagatcatagttactcatcaatctattatattagatattaatcttgttcatatgttatatgattatgattgatttaaagaaattttacatataatgataataaaacagattgaattctttagctacatatattgtttttcatatgtgaacacaagaggatcttagaccactgcgtcatccctacatattataatgttttccaagattagataagagactttggattttgtcaagtgggtatgcttttccaaacataaaattccccacactatataagatgtttatatttactattatttgattaaatctaatgcaacattttccatgaaattccaatagtcacccactgtctctgaatcctgctctatattctactttctacataacttgaagcttgcatttttgcttgtaattgcaagtatttgagccgaattatcccccactcattggcaatcgtgcagactaatattgagtaacagtgggggttaaaattgtaatttgattacttcgcttcaaatttttaaaaatgtttgattcattctttaaattatttaaacacgttgaacatgttaatgttatgatatgagaatgatggtgttgattggctattacatattgaaatttcgctgattcggcaagtaatgttttgaacatataaaagcatgggtgaaaataaatttgatgtaaattcacaaaggaacttttagaaaattaatgtataacgtggggtggggagccaaatcaatccatttaggagtcaaagctaagtcagggatgctttagctaatgcatattgcttcattttaaacccacccacaaattctgatttgacaagtacctacttgttcattgtatattttttggtctctttaatataattaaattttgattttttttatctttttaaaatttaaaatcaacatttttttatcatataatattggttaattacttgtatgtttataacataaaatcacatagacatagtaaatagcatctaataatgtatcttctacaataatctattatattcaaattaagtattattataattgataaaattcttctgttgaatatttatcacacttatattgtaggactcgaaattaaaattgttgattaagcttaaacaaccacgtgagtcaacacacaattgtcaaattatttattaagacttaaaataaatttatttatttgtcttaaaattaaaagaaattgttaaaagtactttatggtcaatttgtgttggccatcactatttcctaaaaaattttctcactttgttaggtgtgctcaatccaaaaagttgaaattctatatcgattaaagtttatcagatagtcatgagaagaaagaatgaattgtgacctttaacaaactttggtcaacttgtgcaattgaaattcctaatatatttttgctcaatataccttcttggttatcagaagattcttatatataaataagaaaataacgtttactcacttaaatatacttggaaaatataaaatggcagtgcacaaatgtttagaagcaagttattaatattttttattagaaattattcttctaaagttattagaagctaatttctcaaattagaaaactttgatgttgcttttgaaggcataaatcaaatcaattttggatgaaactttggatatatgataagcaacatgtattttagccaatacatttcacaaaataaatgtttattttatataactaaaatttataatttataataaataaatatttctaaatacgcaaattattttataattaaattttggaacaatttaataccttttaaagtataaattatatttttagatttataataaataatatatgttgtagtatattgctattttaaattattgataaaaaaaatattcaaattcaagttgaaattaaagatgctaaatataatatattgaaaaggatataagatgttaagataaattgttcatgagaatgagaagagagtattcaaatgaaaaataaatgtgaaggaaagggatgagagtgcaggcttgagaaagtatatatatatatatattaacattcaaaacaatgttttgttgtagaagttataagtagaagttgaataacatatcaaaagtaaaatgatagcaatatataagactagaaactaatagagaaaggtaagatgatgatatttagttcaccttatatatcacttaggctatatattcagtccctaagttcctgctttagtaggtatttcttcactgtaatcactcagggattgcaagaagtatgtttactcataagtttccaaaggttttttaacatttagtgacgaaattacgtataaattaaggctttcgttactcggttgtcaaccccgatagatataaaactttcttaatattttaggttgttaaaatatcaaaataaaattcatccaagcaagtgattaattgttttatgtaactaaattgaaaaaatatatggtacatggtgaaattacccgtgatcattaaggtggatcatgtgtctacttagaatatatccaattatttttaagggaatatttataaattattatttatttacaaggtaaatattatctcttatttaaattatacaattgcatgctattatatgttatcttattaaccaattaattatcaaacaaaggtccatgactcatacttgatccacactgtaaatattcatgtccatattcatccagtacacactcaaaaacaatatccaagaccatctcagagatcttctacctgcatttacttactcagttatattttcatacaaaatctgaaaatcatctgaaccacttccaactctaccgatatttccaaattttgatactaacacatattatgtgacataacatatatagaaagccattacaagcacatattttaaacccaaaaggacatgagtttagttgtttatgtgccaacaaatacttgcatccaattgaatgtatcactattaattgcaaacatcaacaatccatttaagcatatgtataccttccaccaataatttactaaggtagaatgccaaattttaccctaaatatttatttgttgcattttttggtatggtttccgttctcctggactcgaattaattcttatatagcaaaagtacaccaacaattagagtcaaatttgtttaacaatgctgtaaaaaaatgtttaacaccgctgtcaaaaaaaatattgtttaacactatcctacatcgttcaaggtcattaatatttcttcacagaaatcatctaaaataaaaatataaattattactttagatcgtttaatgttaataggaagttaattaaaatttcatattaaaaaagaagataaaaaggtattgtaatattttaacaagatctaatttatttagttaaccttgcaaacatttttttataactacagtaaaatacttgcttgagtaaaccacgaaaaaaaaaagtcgattcaaacagaccttccaaaaagaatatataatttaatttattataacaaaccaacaaagcaagataccaaccttgaaaagaaaaattaaataaaagagaaagaaacttacacaagtaataaagcacatcatgatggacttatttttatttacgctcgggggcggcagaaattattacatcattctattaagagaacgggagaagtgctatgaatatattatttgatgcattttttttaacaattgatatacttttaatattttttattaattataaattttaaattttaaataaaatttattaaataagacataaatttatataatgtttaataaataaaggaaaaatgttaaatagatataatactaataaataaaatacgttatgtactattatttaattataaataataaattttttaattttataatattatactaataatttttaactatagaaaagtttttacattaaaattaaattaccattaaactcttacctaaattttctctatattttaataaatataattttaatattttctatatattaaaatataatatatttttatctgtattttataattaaaatataatatatggtataccatttaaattaaaaattaaatattatccataaggattagtatgattttgaatattagagtcaactcagtctcccactatatttaagtttatttttctaattaaagaaaccataaagatgggagtgggaccagttaatatggtcatattttgaacataaaatgacgaaattacccttccattagatgctttgtatgtaaaatataaaatattttccaaagatcagagacaatcacaaagtgtcccacgttgttgcatagcaagttgcgattgcgactctcttcctacgataaccgtttcctctcgccggaaaaccgacattgatctctctctccgtcgatccccgcccatccctccgccatgagttccggcgagctcctccacatacatccccaggagctgcagttttcctgtgagcctattcagattcaataaagattttcatttttcgcttcaaaattcaatttttcgtttttttttatttggtttctgcttctgggtcttgttctaatttcttgtttcttcctttttttttttaatttttctgggttttgggtttgtgaaaatagttgaattgaagaagcagatctcatgctctttgcagttgtctaacaagactgacaactatgtggctttcaaggtaccaattttactctttatgtttcttttctgattcacttctgagtttttttttttttttataattcatttttattcttttattttgggtgtagtcttttttttttcctttaatttttgtgtgttttggagacttgtaattttgatttgggggtgcacttcatggttttgcaggtcaagacaacaaatcctaagaaatattgtgttagacctaacactggagttgtgatgcctgggtctacttgtgctgtcataggtttctttttctcactctatcgttctatcttctctccctcattctccctctttcacacaaaagcacaattgcatgcaaagagaatctatcttttactggtgggttatatatggtgaaatattctatatttgtaattttgagtttttgtttttgtttcccccctttttttctgtacgatatttttttttttgaataaataacatataaactgacagtggaattcaatcacaaaccgcgtcgtaagtttgttgaattttataatatcaaacttaaagtcataccgatagttatacccaaaaacttttacatttacagtgtatgattattgaacttatattgttaagtaactttcttctctatgtattgactgttagtgtcttatttatgcaatcagtgacaatgcaagcccaaaaggaggcacctcctgacatgcaatgcaaggataagtttctccttcaaagtgtagttgcaagccctggggcaaccacaaaagatatcactccagaaatggtatctattcaacaaattactctgtttcttaatagaattaatacatgtgtgacatgttgcttaagttgatggttttctatgctcatttttacagttcaataaagaatctggtcatgatgttgaagagtgcaagttgagagttgtttatgttgctcctcaaccaccatccccagttcgagaaggatctgatgaagattcatcccctcgtgcatctatatctgagaatgggcattcaagtgctgcggaatttacaggggtgagtgaccagtaggtttttgcatatattttcaaacaatttttcatctttttggttaattaattgttgtgataaacatgcattataggcttcaaaagctttcaatgaacggggtgaacatcaggatgcttcttttgaggtgacatacatatataatttctctctgatttgcattctttgtcaattaaaagaaaatcggctaacattataatttctatcattctattctatgtggcacagaatactttttaattatggaaaaatctaatgcttgatgttggttgttgaccccaacccgagcatgcatgtaataacatctcctcttgaccccaaccctgaaggaccagttttgcatgtcgttgtagagaaaattcaaatatcatgataactctaatttttggaagttggaattacctttcaaatatttttgaaacacataaatttctaagctttcaagtctatgcattgatttatattactgttttggccttttgtcagtaatcttttcttcatagccttgatgtactgtgatttattttgttttttatttaagcatgttgtttggaaatgctcctgatgataaactgtttgaagtggattgattcgagtcattcatttgcattgaaaattctattattggaagaaatttgctggtaacccgattgaagcagttgtctcaactgcctcaaagaagagctcaggatcacttagtgatatattaatattaattaatttaagaaaaatggtgctcattttgaacttatttttgtttcaggcaagagctcttatgtcaaaggtaactgaggagaggaattctgttgttgagcaaaacagaagacttctgcaagaactggtgtggaatccattctgaaaaaaaatcttttaagcatgtttatacatgtgttatgttgaatgtttctacttcctagttcctatagatcttgattgttcacattttatgatatgcatttattaggatgaactgagttcaatatccttctcattatgtctaaatttacagtttggggaagaggagttcatcttagtcttgtgttcatgaatcaaagtgtatctaaatatcttaaaatcttggctgattttgagtgattaaggatcaggaaaatagaggtagggtagggaaactgaaaggaaactgttccgtttgctgcttctaaactaattttattttcagatcaaaagaaatagtaaactgaacgaacatatgcgtctgtgccaattcttgaaagcttttggttcagtttcatgttagccatatccataggcttagtctactattcattttgctaaactgagtatattagtatggttgttggacggtttgaaaatcaaccctcacaaaccaatggacatcctgaaattatctacatccttaatcaatcagcttatttcacatatagttttatatgcttaactattttgttacctatcttagaaatagaaaggagaattgtttagatggcttcttgtagtattcctatggttgacccttcccactgaaatcataccaggaaggtgggacttgtttgatgcctaatatgttttgaatcttttgactgctaagttagaagccatattcacacttttcttggttctatgttctgcttttctgatcacttcagattcatttttactcctcagactggatgcctgtttggctaacacatacaatcaattctttctaccgtgccacatgcaccaatgtaaaattgtggttgaagttaatctaggcacatatcccaaattcccaattgttttgtcctgagtggatgaggtgatgaattcaggcttgaatgttgtctggtccgaactgattgttgacttgactgaactgaatgcttgatcgtctgaactctaatttcaattgagactctggtttgtctaaagtatacgagcaatgtatacttgcaaaagacacactgacaataaatgtatatatctttcatcgtgatggtggtggtgtatgtatagatgttagatatgagcaagaatcgttaacatagggcccaaggccccttgtgagcaattatatgttactttgtgtgggtactcctagtgttgactttggtcaagactaggtgtgtaggattagtaaagatatgaggagttatgcttaagaccaatctgggtttaagctcagttcacatcaccaattacattcaactaattctactaaactttaaaacaaacacatcctaaactttaaaataaatggagtgggatttagattggcggacggtatgtcttaggacggagtggagaaaagctataagtctgatggagggttaaaccctttagtagttctatgttccagttgtttcctgttttaattcttttcttcctcttttctcttctcctctcaccattcttttatatttaactctgtttctctcttttgctttattttcgatttatcattgggttcatctaccaccgaccccaattaatttgggttaaaggtgctgttgatgttgatgttgatgatgttgactagtaagtcaaactgtagtcattactttttttcttttttgaagtaaaactgtagtcattacttgccgtaatggttaaatgtttgatgaagaagtcaataaatacatcacatgcaattattatcttcatttcataattctcatggaaaataatggattggtttggattctttcgtgtgcaggagcttttgaggcgcgatgccagcagaagccggggcggggtaccattcatgtacacagttcttgttggcatcattggactcatcttgggtttcctgttgaagaggacgtaacctgagtcatggctaagttctccaaaatgagatcaattgtagaaagcaacaagaaatatgtgcgatgatgtcgaaaaaccaatttgttgtcttattgtcatgtattgctcctacaaatttggaatgtgtggtctaaaaataggtacttgtatcagccatagcaatcatagacaagtggacaaatgtgtcatgggaagtgtattgttatctgatgtggtacatgtgaccaattctttagcagctcctatttcccaccacgataatgcgttttttaaactattaaattcttcgtggtaacacaaaattattctcaaataaaatatataatcaatcaatttggactatttactaatctaagcacaaactggctacgtgtaagcttttcctcaattactattgttcttttttatggagtaaattatattcacactcttagattttttcaaatagtacagtcttcctgttttcttaacgtttacatactttattgtggtattcgatataatgttttttaaataattaaggtgttggtgtaatatttttctaacaattaagggtattgtatggacagaaaaaggagaattgtatgtcgccttcctctcttggtcctgcgtgttcgatttgtaaatggttttcattcattattaactacaccaatgatcaatatatgaataaaatcaaatagaatccgtgcgaaggcaaagtactatactatccaagggttcaaattcaaagacaccataatgaaatagtaagaaactgatattgaaaatgtatcaaattacaggctgctgaattacattttaggttataaatgaacacatggctcacgaaagtagacctgtcaaaatgggccaatccggcccacccgagttggcccaccacgggttaacaacaaaatgagtaggaccagattgactcactttgatggtggatcagattttgtctaatccgactcaacccacattggttgatgggttatacggattggcccgcgagctggctcgtaaactggctcgcaggttgctcactttaaatttaaaaaaaataaaataaaaaattaaaaaatcacaataagtgtagaaaaatgcaaattaaatcaatttaagtaaatttaaatattacaaactgtatcaaacttaacctcaaactaaatgtacatgaaactcaaatataaatatgtttaacaatattaaaataataaaacaccaatctaactcctcaaatatcaaattctcatatctcaatcagcaatattaacttgtctaggaagagtattagaatcatggtttgacaaatcaatttcatttttatcataattttttcattatctttttttttgtccaacccgcgagccaacccaactcactcgggttcaatccaaatgggttgcgggttaagtgagccgggtccaaatgacccgagacctaggtgagccaacttttttgtaacccaacccaccaattttgcgggccaaaacgggctgacccatgggttaggcacattttgacagcactacacgaaagttactaagtatacagaaaaggaaaagcagcatagtacaaaagttatatatagtgataatgggatacaaggaatactaaatctgtatgtcactccatgaaatatatatacatttaacagtccttttaatatcttccaatgtgctatcaatctatcatctctgtctaaccatgattctatcaagattttcaagaccctttaatcaagttgcaacgaacaacaatcttccggaaatcatcaaggcttagctgcaacagagccaattatttttaacaataataattcaaacagtgcacaaaatttttcatggtaattttccacaatttttatcctaaggggtcaaattcaccaattttcatatttctctaaagatgtaagaaagaactatgttttctgaccttgaagttaaaaggaaaaatatgaataaagtgaaagagattaaactgcttagtaagtacttgcaatcaacaaaacatatttggactagtgtaagaactaagaatcctaaagaatacattctatagttcaaaaggttttagcaattatctgccaaaattaaaattgaaagtcataaaaagcttataggtttttctatgttcttcctgacctcctgccagaaaaacacacaaaagaccttctgatccttacctttccatctccatcaccatcgaagtagcgaatcatatcaactaactctttgtctgtccataaaaaatcatgagctgtagctgccctttgtatatcccttacacttatagttccatttcctgcttctgcatgccacaacttccttgtcaatacaagtttacaacagcttgcgcatgaattaaaaacagcaaagaaaaagagggaaaagacttctttattctcctatatgtcaaaccagaacttaatctagataaaacagctagatgttgatagcattattgaatctcttggcatctcattatttattaagagcttaagtagtgacttctctcttatttttatttttggtttagagaatgagggagtatttggtgtgatttgccatcatatcaaattttcaggtaagcactagtttgtgcaaatacgaaaaaccctgaaataaataatggttaaaaacttttcatgtaagttgtgttcatcttaaagaaaaacaaaaggaaaaagaatctgaactgataaaagtaacattgagtcaaataaaactatcagaaacaaaaaacagattttgaagctgatccataccaatgtcaactatctaatactttaaacaccaaatatgcaagcagttatacgttcaaataatagagtccttcaaacaatagtcctcctatgtaagcaaataaatagatgcaaaagaagagagcaattaactaccacactataagcgcaagaacgtggcttcttaaaccatactgtttttttgtacttggtaaaagtttaaaaaaaaaactccaaatattcataagttaaaagtgagggcagatcattgtttcccatttaaaattaaatggatcaaaatggctggcttacatataactctaatcatctcaacaagagcagcttttatgttggcatgatatactgaaactttaagggaaaacaaagttcctatttgatgaataatagatggagatttaagtatgactgttccaattaatctcttgccattgctctttgttcttaaacaaataaaaagtagcaagtacatatattatcaaattaccatctagctggaagaagtgtacaatgagctcatcctcggtcagttgcagccgactagcaaactgttgatgttgaaacagacaaatattaaaaatataaaaaaaagatccaatacaaactaaacagttataaacaaggaaagaaatcatttgaatagagaaatcgatacaaaccgattttttgttcttctttcttcccttatcttcttgaacatgaccgctaccttttttctcagtcttgctggtgttcactacattcttgtcaggcaaataagaaccttctgcagagtcttgcaaggaaagagcaattgcctatccacagacatcatacagttacaatgctgcttggcatcatggaaaaaagcttaaaatgtatatcagaaaaaaccaacaggatgtaaacattaaaactacctgcctcagagcttcatcatcatcataatcaatgtactctgaattactaacatgcttcttcccagagactctggctttctttttcaaacttttgttcttcacctggagttggtattaaacaaaaggatcgtgattgtaaatgtcaaaataattcttagaccagaagtgaagtgtctatgcacctaacttaccaaaacaacacaatgccaaaacatcttattattcatatcaaaccaaacaatgattactgcaaaatacagaacactttttatctttaccaacaaaagtaactcaattttgcaaaggagtaaacacaggaaaaaaatcccaataacccagtttcattaaagtcaaaacactataagatttttgttaattatcatacaatttatttaaagtgctaactaactcatttgcactttgcatgaggttctaggttcaaacctcactgcctccattgtacaccaaaaccaagtcaaagtgtcatctgccaactcatgttcttctaatgtttacactctaaacaacttggtaagttaaacaaaattataagcaactatcagcattatcagatgaaatggtttaaggagtttaaggagaaatgcaagtgacaccaacaaattgtggccacagtaccataagttcaaaatgcaaagagaggactgccatagaataacattttgtaaaacggtttattcaaaaagatacattgtgtagggtgtttgggtgagtttgtctaaacttatttcttgagaaaaatacttattttaataaaataagcagctttctgttttcttaatgtgtttgtctaaacagtttttgttttaaaaaaaaaaaaaaactgttttctacttattttgagaagcaaattctatttgcttattaaaaaagtgcgcttattttaaaattgtttttttaagtttaaattaaccaaccccgtctctatttatagagcttattagtaagttgtaacaaactaatattcctaattagttactcttaacagcaacatgtcaaatagccttaaatttctaaacttgtaacttaggtaagctacacttgttagcaaattgacacattcagagacaaatttgtataaaagagcataaaacatgctcagtttcagaaccaaagtatacgataactccacaaaataaaacataaaaaagagcattatttgaagaattttgacgacccacctttcttttccgtgaccctgaagcgttttcaattgcaaagttctcgtctttacggtcctcattttcttcacttgaagaacccgatacttgttctctctcgtcttcttcgggttcatactcttcatcatcgtcatctttaaccttcttcttcttctctttgcccttcgtggcgttgtggggctgcgaagaaccctttaacgacgaagcgatttggggcaaacccagagcctccaacctggctctgttctcggcgattctcgacatcctctgtttctcgtactccgacaaacccttcatcttcttcacaccattcccctccaccgtttgtgcatcctcggattccgaccctgaacttgaggggtcctcggattcagaggtttcgcgttccgccattttcggattgttctgtgctttttgctattctctttcgactctgtttttctttttcaccttcatcatgtgtactgattactgaatagagtagccatgtttatttttatgtttgggctttgtttgaacactgggcctgataactatagtgggcccaacttcaagcaccataaaattgtacacccattatgcacaccacctcctgttggaaagaagcaagcttcttttaagaaagagaattattttttttttcacagattgtagttttttttttttagtaatagtttgttttttaaggtgaaaaatgaacaatcatttttaaaatagaggaatccaatataagagggtttacaagtaatttacatgctttacttaactaatcgaactaaaccaattaataaaaaaatatacaaagccaagaaatgataaaagatcatacttcttggataatttaattacgaaaccaaagcccaaacccacttggaattacttagtttggtttgagatcatgtatgtcccaagaataactttgactccaatttatcatctttaaaatctagcttgcgataattttgacaaaaaaaacaatgttataaattgacattttttatttgaaataaaaactacactgaaaaaaccacttctttccctttccaacaggtggtgtgcattgtggaaccaatgggtataagttttgtttgtatgttactatcatgaacctaaaatataagcaaaagtaggtgaaagtacctattgagggtaattttaaaaaaaatttaccgtttgaaaattactatcatggacctaaaatataagcaaaaataggtgaaagtatcgattggggtaattttttttttaaaaaaattatcatttgaaactaaattttaaattaatacccattttaggctaagtcgtaataagtattatcacttctgaatttaaagtcgtaacatttattataacttctattttcttaaaaagaacattaaagtcgtaaaaaaattatgacttccatttttttaaatacaattttaaaattgtaagttttttttaattttattttacgactttaaagttgtaaagtaatatttttatattgaagtgaaaaattagattatgacttcaattttgttttattttttctaaatcataaatcatttatttattttaattatttaaagaattaatgtaaatttttttatttcatttaatattttctatattttttatatgattttatttattttctatatttttatataatattttatttaatatattttcacaagattttatttaatatttttatattattttatttaatattttctatattttttactattgttaagaattattatttgttttataaattaaaaaaataatgcaaaagacttaaattggaataaaatattaaaatatgctacatagtcatttaacaaacatattgtaacataatgagattgacgaatcaattctaaataggtttaagaaatgtttattatgtaaaactaaaaaacataatcgtaataatttttcatacaaataagttgatgattaatattgtttttactatttaaatttaactatgcattgatataatattttactttaaattattaattttcatgatataataaattctattttttactattaaatagtctcttatcactaaaattttgaatatatacacaatccaaaatttatttatgacattcattaaaaataattatgagtggttgattaaagtattaaactaatttaattagaactaaatgatttgatacaagtgattaatatgttgaaattaaggttgaatcattaaggtttttggcgaaaacaatgattgacaagaaggaaaagaaaaaactaatttaatataactagaatttagaattactttggtttggaattaagtttctatgtcttttttttattgggctaaaattctagtaaagttttttgtttgtcctttatgttcttgttgggctgctatccttgttcggctcattgcagtactcaaactccttcatgcagctacactgaacagcgtgtttggatggaagcctaaaatttgcgctaactttggaaaatacgcaaaaactatttagtgtgtgtttgtttttccattcaacaagcttcaaaagtgcgttcaagtctcacaaaacggtgcattggaacacgtgtcaatggattaaaacggtaaaacgaacacaccgttgttacttacacgtggaaattcacgttcgctctcctttttctatttacattgcgtttgtgtgtgtgtgtgtgcaatatcacgcaacacaaccttgttcgttcttcgattgttctgaggcgaaccatgacggacggtcatctcttcaacaacatcaccctcggtggccgtggaggcaccgtaagctctctctctctctctctctctctcttctaaaccctaatttttagtttgccacattcaagcatgccttttgatttcattttacatgtaccactgagagttttgctagcgaacgaatcttagggttttgctcttcgttttttcttctaatttgatttaatccattattattatcatcatagaagattacctatttatgtattttataaatgtgttgaaatttgacttgttctagttagtactaactagtgcggcatatttgtgcgttagtggttcttgtttcgttcgtaaaaccctaagggagtgctttgtttattagatgaaatgtggttcttgtttcgttcgtaaaatcttaaggttttaaattgtggtcatggttggggttttgttggggtaaatactgtcacagagaccccgacaaccttgatgatgcaatcgcagacagttttttaaaaccttagtagaaaatagacagttgaataagttgttttgggatcatatttctagttgtaccaagcaattggaaagtattttcgttccaatttttctaccttctataccagtaagtgatttcatttggtgttatgtaccatttatttaacattatgtaggaacaaacggaatatgcatagcccctactcagagttgcattgcttgttgttccatgtcaactgtcaagtttttatcagcttcattgctttttgataaaaatataatgataattagagagtcaaagaattgaatttttctagtaatttgtgcatatgagacttgaattagcagttgaattaagatgtgtgacacttcttttcatgtaaattgagattgcagaatccagggcagataaaaatatatcctggaggaattgtatggaagagacagggtggtggtaaattaattgaagttgataaatctgacataatgggggtgacatggatgaaggtaccaaggagtaaccaacttggtgttcaaatcaaagatgggttgtactacaagttcacgggatttcgtgaccaggttactttctctgccactcccgaatgcgtattttcatacatttgatgtggaaaaaggaattcaaacttttgttccttttattaactgtgacaaatctaaatattgaggacttggacttgtactgctagcaaatgctggatgttaatttctaatattgttattttattcatatttttgcaggatgttgtaactttgaccaattttttccaaaacacctgtggtatatcagtagaagagaagcaactttctgttagcggacgtaattggggagaagttgatctaaatggttggtgaaattacttgagctgacttatgtgttgttattgatattctccacatggcatgtcacgtgtatcttaaacatctatctgtcatccttacacgctaggttttgtaaatttgttttttggggaaaaagttagtttggcattatgttctgtttgatatagtagtactcatgaggaaatgacaggtaatatttgatttttggggaaaaaagttagtttggccttatgttctgtttgatatagcagtactcatgaggaaatgacaggtaatatttttagcaaagggtagagctctcctattttcaaagaaattcagttgatatcagtatatcacccagtttgttcttggagagcattggttttttctggatagtgcaggatgattttcatatatgaagaaaggctgtgattttatgtgctgcaactttttccctccccaatttgcagttgcttcttttcttttgtcatactcttgactgttgaatgcatttaggcaccactacctccactttggtaatcacatgaagtgcaattttaagtgaaaaacactagttaagataggaaagtggtctttatttgtgtatgagttttgggggtgggggtggtggacttctcaaagaggaactttatctcattcttgtttttctttggtgaagcttgtttaataaaatttgacttgactgcttttataagtagttatgctagtagagtagtgggtgttcttattgtccatttccatttcaggaaatatgctggctttcatggttggttcaaagcaagcttttgaagtgtctttagcagatgtctctcaaacgcagcttcaagggaagaatgatgtgatcttggagtttcatgtggatgacacaactggagctaatgaggtatatctatattttcatgcacttatattgtcttatatgttttagcaaattcatgccaaactggtagctttttgcaagaaaattgttctcattcaagtttgggcttgtgcaatattaaagactctggttatttggtttaattttttatggcctaatattgtttatgttatgatctcagaaagattcactgatggagataagtttccacataccaaattccaacacccagtttgttggtgatgaaaatcgtccccctgctcaggtgagtttgtttcagactataaaagatctcatgttataataacttctaggttaactgacatttaattttttctgcatcaggttttccgtgacaaaattatgtctatggctgatgttggtgctggaggtgaagatgccattgttacatttgagggtattgcaatccttacaccaaggtagtgtctttaaatgcttagacatgtatcattcaagtatttttggcttcatattgtagtttattttgtattgcttgtatttgtgtcctttcaataaatatatcaagtatcaatatttgttaattgaaatttgcacttttttgtagaggacgatacagtgttgagttacacatgtcattcttgcggcttcaaggacaggctaatgatttcaaaatccaatatagcagtgtggttcgcctatttttacttcctaaggttcatttcctgatcctgtactttcatttaataagttgactgatatttgttttcatattaagtgattaagtgacaagtaaaatttcaatgtgattagccagtcatgtctttaaattgatgcttttcttttgacttgttaagtgtactgacaatttcactatgtttctgtagtctaatcaaccacatacctttgtcattattagtcttgatccccctattcgaaagggacaaactttgtaccctcatattgtgatgcaggtaaacatgctcagtagttcatgatttgccaatttatgtgatgtgtattttacttgcttctgaacctaacattgtttcactcatttctgtatagtttgaaactgattatgttgttgaaagtgaattggcaataaatgaagatctttataacacaaagtacaaggacaagttggagctgtcatataaggtattttgcttaaactgttaataattgattcatgtcattatataacccgagatactgcctttcaagtactgtttggggaaaatagaaaagaacatcttaaccattttagatgattgagtgatgcatgaatttgttaactgttggtcatgcatatcacatgatgcagtgtctgatgtgtttcattttcaattcaataatcagggtcttattcatgaagtgttcaccacaatattacgtggcttgtctggtgccaaagtgaccaagcctggaaaatttaggagttgtcaagatggttatgcagtgaaatcatctttgaaagctgaagatggaatcctatatcccttgagaagagcttcttctttctacctaaacctcccactcttattcttcatgaagaggtaaaatctgattgttcttacagataaccaaatgtcaattactggttgatatagcatttgatatttacatgatggaggttttaattgtttttttttcttttcctattagattgactatgtggaatttgagcgccatgctgctggtggctccaatatgcattattttgaccttcttatcagactaaaatctgaacaagagcatctcttccgtaatattcagagaaatgagtaccacaatttgtatgaatttatcaggtaaatgttagcctattgccaaattctacatacaactaattgttatataaacaatttgtttttggtctgcacatccagttcaaagggcttgaaaattatgaacttaggagatgcccaacctactgttggtataaagaaggttcttgagaatgatgatgatgatgctgttgatccacatcttgagcgcatcaaaaatgaagctggtgaagatgaaagtgatgaggaggtgatcaaacagatattttatataactttcacctttatctttagttcgtaagtagcatttagtaaaattgcgttcttgttttaaaaatcaaggagacaacatttatttatgttgaccaacatctgaaaatagttgggcatgaaaaaatttaagtgaactcagcttacatttcagtttttgtaattattgaacttacatccataagtatgtggttgacaagtgtctatccatttttgttttttgtgttttctgttttgcttgctattgtgtttgtgggcatttgttgtgtgcttctgtaaggctggacttagacaaaagttgatccactttggtctttgggggggctcagtgttgcaggattttcctactgttgtttgtttctatatacattaaatggtggtaattgtctataggattccgattttgttgctgacaaggatgatgaaggttctcctactgatgattctggggcagacgattcagatgccgctgatagtggtgatgagaaagaggcaagttatttttatttatatttgtaatctgtgatacttctctactctatatttttgctgtgtctgacaccttaatggtgaccaattttcagaagcctgccaaaaaggaatcaaagaaggatctgccttccaaggcatctacttctaaaaagaaatcaaaagatgatgaagatggaaagaagaaaaaacagaagaagaaaaaggacccaaatgcacccaagagggcaatgtccggtttcatgttcttttctaaattggaaagagaggtgcgatctattctatgtcatattggttgtatggttttggatttgggtgtgtaagctgtgggtactgttccaatgtgtctggacagtgattcattgtagcaaaaaatgacctttagcaacatttttaatacctattttgattgtaagatattaaaaaatatacctgaaatcaagtaggggtttatgtaagtcaagttctatacttctatttacttaatatttgctgactttttttttttttgacagaatctaaagaaaactaatcctggaatttcatttacggatgtgggaagagtacttggagagaaatggaaaaagttgtcaggtatcgctggttgccaattgtttgatttcatgcagttccacttatgatctgagttttatgtttagggactaaatcactaattgtactttgtttttacctattgaatgcacagcggaagagaaggaaccatacgaggcaaaggcacgtgaagataaaaaacgttacaaggatgagattagtggctacaagaatccacaacccatgaatattgattcaggaaatgaatctgacagtgcctaaggctgtgaaaaaaatcttgcagttttataaatacttatgcagcaagctaatgtaagccatgcgccgtatatttctcactggtgatggcatctactcatgcttcgtaaacttacacaagtttatgactaactgatgtaggatttggaacattattttttgcttcaactgttgcacgaagaggatttaaaatattggatcaaacctacttttttattgttttttgttccagatttgcagattggtgcttgatctgggacatgcatccgtttgaatgtgatagtaaactaaatgttttcttacgtttggaaaatcagttttgtaaatgttcattgtcagaactgtccacttagaatacattatctaatacatttttataattgattgaaatttattggaaattatgtcggtttaatttattttaatgaattgtacttttaatttgtagtttttgacaaagtgttggaatgagttatagaaagtgttatttattaggaagaaatcttctccagtgaaaagaaaaactgaaatgttaaatttgagagatccaagcgtttattgtttacttgttcatctactcattttatagtgtttgactgagacacattatatcccgtaccagcaaggaaaaaagaaaggggataaatcaattgtacaaataatcctaaaattaataagattttgcttagatattttcgaaattccggaatttgattcataggcaaacgagagtagaactaagcatcaaggaaatcattgtcaattgttcaagtaaccccttcaatttcatgcttctagctccttcaatggtcacattgcctttctgattttttctatatggaacacctctcccaattctctttttttttttatcaatattattattaagaaaagtttaggtaagttggattttgaaaattcacaggaattatgacaagtctcaagactcatagcacttataaatgtatttataaattacccatcaagaaagttttcacattggtagcaggaatcaaatgcatgtcttttttatatgagtttgtttcttattaagtggatcaatctttattgatacaatcatgtcttctctattatatataaaataaaataaatttaataattatgtatagtaaatctaagtatgtaagtgtaagattttacataatttttacatagtcaatcaaacaaaaattgtcactggtgatgtgactttaaaataattatgtgaaagccaataaaattatatatgcttaattatgtttttagtacttaaaataatgaattaagttttggtcctccaaatttatatatatgtctcaaattaaaataaaatattttaaatttaagggatgtgtgtacattaaataaaaaaaatgtgatattttttatatttataaaaattatattatttgtttaatgaaataaaatatatcatttatatcattttcttatgatattatatgcctatatttatgtaatattttatatttttaagtactcaaatataaaatcactttattaactgttttgccttgaacccataaaatttcagcacccgtttgcttttcatcacattagaacacagcgatttgtttgagagctaccatttctccctttcacactaagaaattactaacttaaaatgagactttaaaccatggttggattataatacagttgacaagttaaagtatacacatctttatggatctatgtcatgtttggaatataaactttaattcctcgcctgcgtcgtatcagaagacccaaaactctaaacatacgcgcattattcaatgcttaactcctaattttagtgaactacaataatatgttaactaccatgttgatccattaaccctaatctatgtagcctctatgaatatgacaactgaaaaacccctattgcccctatattgtgcaactttttaataattcacttcatattaaataaaatgttgaaattgaaagtgaaaatgcaaaaaaaaaaaaaaaatcaatctattctatacttgattcttaagaattattgagagaaattagcagaaaaatttaaaactgttcctttgttactggtattgtgaatggaaaatatcgaaaatgctaactaagagaataacaagagtaaaatctcattttcaagttgtgtattttactttataatattttaaaattagtttttaatttataatgtaagaataaatataatggagtactatttgtaatggagaagtgtctacatataattactctttgcattagaggtaaaaaaaataaactcgaaagtaggacttacaatatttaaatttgactcctattttaaataaaaggcctaatattatctacttgtgtaaatatataatttcaaaatattataaaattttaatgcagtaataataacaatgttatattatttttatgtatttatcaatttaaattaatcaacatattaagtctaaaaagatttgtaaatgactaaaacccgaactaaatttaaacaagaaaacaattcaactaactcattcaatgaagaagcctaatttaggttatgactatctagcaagctacccataaactcctaacaaataatttaacctatttatacatctctagaaaaaagaatacaatacctgacataataatagctacctaacaacattcccgaaaatattttaaccatgtgtgcttgtataactttgcttgcataacacacattaagatggtatataacttagtagacataggctgcatttatgtgccaaagtttcatgtattgtatttttatatacaccgtgacccttaaagtatataacagtaaaatttcttttacccaaaaatatataaaaaaagaaaaaatatttaatgataatttaagaaacacccctctgttccctcttccagttattacagctaattaaattaaatactattcattgtctattttgcaagtggaactgctcttgcaggaccacataccactggcatgcctttatttcgagattatgattgtggatatccatagcatatttctcaccctagtttaattatttgtattggaaacatgcttacgaaagcatgtacgtgatacacccaaaaaactatatatattacgtgattgtgttagttcatgtattaaagaattgagttatttatatttatatatcaataaaaaaaaaagtttcaaatctttttacatggccagaagtgtacgatgttgtccatagagcttaagctagattttggcattctctgttttctgaattcaggggcaaaaaatagttataagaatagatagtagcattgtagttatgtattcccaatgtaaagtttgttttttttatatgagaataaacaactctttactttggtttttagctataattataaaatagagtttctttgtccttatattttttttttatttagtttggcattattgttttagtttcaataaaattataaattttttaaataagttctaaaatgttgcaatcgagaccataacgggacgatgaaccaaagaaactgtataccaagaataattttgataaagcctgaaaaaaaatctttaaaaagaaaatagtcctcaaagtcaaaatatttgggtttgagagttgattatgcttcgagaagatgttagcatcttacaacatatccatcataaagatgtctgactctaattaagtgtctagaattaagatgactataattttctttttccatttgaatattttctactaactataaaaatatttctttcactcctttgaaaaaaaaataagaatcaaatttaattgaatgaataacatttgtttagaatatgaattaaattatgaaaaggttaatatattttgtcataatgatttgattctcacccttgtgtatcagtcaatgaggaactcaaagaatctaagtcatgtagttcttaaaataatttttagtgtcgattgattttaactaaaatagtgtgttaactcaaaatacttaaattacgtattgtgttaaaaaaatcaaaatgctcaaggacctattaattatttattaaactttataaaatcaaaagaacgaaaatttgattaggaggttcagcatttgttttatattttaacatatttaccacttgaaaccgaaaggttttccagatgaatttatttacaggtaaaaaatagaataaactttttgcaatgtttttgttcagtcagaaagcttttgtgtagctacaatatttagaaaatgaagaaaaaaaaatgttttggggtactatatagaaaatgcagcccgataactcctcactttaattaatatatagaaaatgtaaagttttgttttaaaaaagcctttgtgtcggttatgtgttttctggcagtctgcagtgatttgttttcttcgtaaattcttgattggtagaagttatattaaattttgattattaaaattctgacagagcctttttaaaaaataattagttttcctgaaaacagattcaaacatatataaataatacatacatagacagtgtaaatcttttttttagcactatcctctctttttggtgaaatttaacactatcctctaatcataaacaacaatatatcaagtgtttcaatagtcatattaaaagttatttctgattttttgacaaagtaaaattttgtattattagtactatctattaaactctgaacatttattagtcttaaatttttcatatatatatatgaaaaataaatttcttgtcaactaaacaaatgaacatgactagcatgctaactaactaatttaatcactatttttttataaaagtacataattggtaatagagatcaaatcaccaaaaaacttaaatacatgttgtaaactaatttttaaccactgacctaactaacatgcgagttttataatttaatttaatcattgatgttggattctggttaagaatgcaagaacattaagtactcaaagaaaatgatttcaagttaaagttttaaatatataatcatgttaaatatttagagagaattttgtctttacaaaagtaataatttttgtaagtagttactttgagaaaaactcataaatttaaaactgtaatataaatataaactattattttttaaaaggacaacaaacggtttgtaaaaaaaaaatttaaaaaaatacaagtgtatactaaatgtgaaagaattgatgtttacttcttttttcctcataagtagtactcatacttgggcgttataaattaatgatcaaaagctcaacctacaataattaactttgataaacatcttaactatatatttaatttgagaaaacatagacgcccaggagagagatcttttcccttatttgttgtcacgttataaatctgaaatgttttttttatacataacactcgaattcaaaattttatttaaaaaatttaaacttagttccactcgaaactttgcttcacatgttgaactttaagtacttatttttgtttgatttaaaaatttagaatgtatttatactttctttttagtttagccagtcaatggaaaatttataatatatttattcattttcaaatatgcatgtgtttatttgcaaattgaaaaaatgtgcatcttgtcatattttcacgtcaaattgatggaataacgcaaaagctattgtgtatatagcttgtaatcagatattgttagacgtagaatcaaatgtgtagatataaatgtttactttaatttttttttcgaagagatatgtttagtttaatttaaatttaaaaatatattttttaaaaaaataaactaaaccaaacacgtattaagtgagattattaataacagtccagtataatttaaaaaccgtagtgtttgagatacccctttttttatgatgacatcaatatttttttttataaaatatcaacattagattatgaatataatttttttaaggactcttttgaaaagtatttgacaaaaaaatttaattatttaataaggtgttgaatattgtattttttggggaaagaaacgatagtatcatgagttgatcaaataattggtcaaatattttaaacatgattcacgaatgtcagtgttcgtctccttgaaagttcagtcatacacaattacattattaatacctaataattgatgttatatttaaaattacatataagtaaattaaattattttatacttaccaaatatatggatcaaatagtgcgaggttgttacaacttaattattaatcttatgtttaaattttaagtattcacttgtgtttagtactccaaaggaaaattttataatatataataatcttactcagttcaaataatatttaacttttatggagaacatgtattttatgtaaaaaaataaaaacaaaacgtttattttacagttttttttaatattttatataaaaacattttcaaattaagtaggataataaagttctcctactttaaatgtatgtttaaatacattgttgattttcttattttataaaacctgaattttttgtctcctattttaaactacaacatttagattttttttttcaaaaaaaaataaagcaattgttctcttattttaaaataatgacatttagtcttttcattttgtaaaatctttaattttggttcttccattaaatttaaagggttaaccgctaagaaataattaatttgatatgatccaaatttaatgacatgaaattatttatttaattcacgtcataactaatattcatcttttaaggattaatatttttaatttgatggaattgatcaaaattgtaaattttaaaatttgaaaattaaatgtatttattttaaaataaaaaataaaaaatacattattaaaaaaatagaggaccaaattttttaaactaagtctttaatgtatttcttttcaacacatgcgtacacctacaatgtccctattattatttttattcttaaaataaaaatacaaaaacgtttcattctagttattattattactattattaaaatagaattataagaatatccaattctagttgcaaagctgttcgtccctttcgtcccgccaccaatctgctgaacaggagggtgaggaggtgaatttgacctgctttttaaaatttgtcggaaaagccaacccattttatttttattttataagttggtgagtcaaattagttgaataatagaaatgaaataaaatattctttttgaaaaagagtaaatgaaatgataagtaaaatgcgaatgtatacaaagattgacacaaaaaattgtactgggtttttatacttaaaattgggaaattaattaaaaaaatttagtgtctggcaagttatttttaactagtttttttttatagtatatttgattaatttatgaacttacatggccataatagaatcgttaaaaaaatcatatactatttgaaattatatatatatatatatatatatatagatagatatatctgctcactaataactagttttattgagcactgttaattcaatacattaatacttttttttctgaatgacaataaattaataccttttaattaaagaagttaacatttaggttttaactaaatttttaataaattctgtgaaacataaaatttaacttctttttacatatatatgattgtaagaaatatctcccatgaaatctctttcacgagttttgaaggggcacaaaaatgagatgtcacttcttaactagatttacatatacaaaagtccaaatttgaatccttgatcactatttgtaactcaatctgtcaaaagataatgaattgacctgacaaatcaaacgtgatttgccaatactagccataaatttattggctatttcaaaatgtgaaatatttataaccaataaatctgtacgtgactgatttcataatttgatcactaacaaattcttgtgcaaagtaacacaattattgccaagttaaaatcagtcaaagaacaacaatttttcctgcattggagcaaatccaacattttctgatgattcattttatgttctgatcttgacagtaaagtcagtgtagtgtaattgagataaaatggatttcttaggttgtatttttatgatactttaaaagttattttaaaaatacttctcataaaatatctttgtgagaatataaaaataattaataacaatcattaaattatgattaaaaataatagaggttaaaattaaaatatttaaaaattaaaattaaaatttaatataatcattaaatctctaaaagattcacatcatcatcatcatgactgtcaccacctctatcgtcatgaccatatacatcattgccaccaccatcgacagcgatgataatgacaacacgacaaagatcatgatgataaaggtgataagacgacaattaatgacgatggtgatgacctcaatattgatcgtagtgacgacaatgactatcataaaggtgatgaattaatcaaaatattttagaaagataattgatatttttatagatttatttgttatttaactaatcttttagaaatttgatgatatattagattttaattttaaattttaaatggatgattattattaattattctcgtagaagtcattatatatatatatatatatatatataatttcatcggtaagattacgagtaaatcaccaatattgtccattttcttaagtggttcttaaagtaattaaactatccaagaaattcttgaaacattgaacatccatcacaatacacggcaggattggtaacacttctaggatcacccgcatacatatatagtacataaaattggcacaagacattcatgctacatattaaaaccatgtatgccaaattcaacccctaattaatacagaccaatcaggcaaaactaaagcatggacataaatgtagagcaaccacttttggctctaagaaatttgctttgccttcaacataacagcaagacactcaccaatccttagaaatggggaaaaggcatgcatatacccttattaaatgtaacacactagtaataactgtagaatctagatgtcaacccacaagtgaagaacatttgggtggtgcatctcattaaaaaagcctaaatacataaactaggtagtaagttatgaagcacctttaaatatataaggtaataattagttgctgctgctgctcagcatctccaagttgaaactgtgatgagttctttcctctgccagcatagagcaagagatgagtactttctctccaattgaaatccccttacaggtgccttctgcactaaaccctcagcttgagcttctgtgaaattgctaaatgtgaatggagagaagccatattgcagaaacatgttcctccaagtaggtaatttttcctgcgaacggaggggacttaatatgatcttcttaatggctggaaggatgaaatgcttctcaatcttttggaggacatctaggttcacattcacagcatcaagtgattcaagcaaggctgagtaaaagtgaagagcatggactacattggaggaaaatggtacatcaattctgtcgaaatttcgatctagagtgaccacaacttttggcctaagctgctttacaaagtgaaggactgacggaaacaacgatgggtggtttgtgaaacaagaaagtggcatgtacacagcaattgcctcattatcatagaactggacggagagtggacatgaaggagtgttcaatgattcaatgcttaaaacattgagctcaaaagacatgttaaagtctttcgcaaattggttcaactcttcttgagcgatattgagctcaaacccatcacaagtgaggggtgatacaatggcagtgactttgagcgaagtcacgcccctactcctcagggcaagcacttgcataagagaagaccattgcactccaagcccgatatcaaaatcgataatgtgaattcgatcaaacctttccacagcttcaatgattggttgattactagtgaagttggcaaactgaacaacaggtgatatctcagaaaaggacttatatgctccaattttgaatatggaactgatggttgagaaggccaaggcattgtttacatttgaatgaagcagtgacatcaaggcctccttcatgtagaaagcagccctttgaaaaggcttaccaattgaggagagctggtgattgagccgcgccaatatcccttgcgcttgaaccggattaccagcttctatcagctcagcagttttgtatagctggtcaaatatagcctgctgaagctggtggcttgcatcttctccggtggaactcaccttctgctgtttagcagaaggcacaacctgtggttgcatatggtgaggaaacaatggaagctgtgtgtgttgcctcatatcaaaaccctcttgccccgagtccaaaaggggcaaccttggaccctgataactgtgccctacaggttcaaaaaccgggcgttttgcctgatgctgagagaaaacttgctgctcctgcaattgggggtacatcattggcacaaagaaagaagggttatcagagaattggacttgattctggttcaacacaaactgggggttgatgacctgaggcttctcgtcaacctctccaaccacttgctgctgctgctgagaattaaacccaccaagagatgttgaaaacaacaaaggactgttaccagaaacagaaaacattgattctccaacaggcaaaaaaccagccttatcattgtggccacctatattctcagcaatgaaagggaaaccagggtaattattattccctgaagggtcaacaacacttagcatattcaacccttgatccacaacaccaaaccctgcattgaaatcaacactttgttgagaactaccctggaagagcttgctcaaccctgcagaagggtcttcagcatctcccatgattagtctcagaatggattgatcttgacactcccactcctccatcattctcacaacaccaccaccacatttttcaggtgaagtttccaatgctgcctgagaaactgttggagtgtaacaaatgatgttgttattggttgagccacctttgcttatggtgttgctgctgcctagggaagaggacacagtggaagagttagggcttcttctggtgtcaagaactgaggtgggctcagagcttcttcccacatagcaatagtcctttttgtctatggtccactttggttgtggattatgcaaaagcactgaaaatgaatctgaagctgaagagaaatccaacactcccttcccttgaaactcttcatcaaaaggaaagggcatggccttcatctaagaaagttaactattaagggtatccagtgccccccacaaaaccactccagtttcttcaaaaaagttagcacctttggctcaaaaccggtttttgaacaaatggggttggctcacaaaaaccagaaacaaacaagacttggaaaaaaggaagcaaaaactgagatgctaaagtttagaaaggtggaattttggactgcaagaagaaggctcggaattttggtgggatattcaaaattgttgaagtcacaaagagggttccaaagatgaaaacttgagcacccataaagcttgtatttttctttctggatctgtggcttattattattctccaaacagttgcagtgaaggaagagagccatgagtttgttgcttgtctttaaaaaaacaagaagcacacactaacttgaacaaacacccttaaagcttgtccttttctttctggatccgtggcttattaagctccaaatagttgttgaaggaagccatgaatgtgattctttgttgcttatgttttctgtgcgaaaacactctttgttacttgttgtgttttctgggatggaatgctctctctccctatcactgtttctactttagtttttaacttcttttagtttatgttgtctgcacagtaatttttcctccggttggtattgttgctttcacctcaatgctctttccccagtctcagatgtagcgcgtgatcaatagataattctcctttatttttattttattcaaaaaaaattaggtgaattggatttatagaactcattaaaattaagatatgactcaagattcaattaaataaacaggattttattgattattcaccaataaaattttcatacaaacaataaaatttgaactcatatataataaaatataaatataatttttatcaactagataaatatttgttaacatatatctttactcttataaacctttctggtgtccactgcattgcagagggtgtcaattttcatttatcccagtatcatatgatattttgatttggtcaattgtttgagcttggaatcaggataactaattttataatagtatttgatttgataaataggttaaaataaaaggaaatataaaatatttgatatatttaatgtttattgtgttgtaaaagtaaaataagatataaagttacataaaacacatacattttaattttaatattatatatgtttcaatcgtaaatgtcccagcatgggattttgcgatgacgatcatagagttcattcacttgtttttttttttcactcgtgatattggaattcaatcttttctggttgtgacttatgagtgttggatatttgttgaaccctttatgcataaaacgatttataaagttttgatgataacaaataatgaatgtcacattattagattaattgcaatgataataattatttgatattttgaagttactaatattttggatttgatattttgaagttattgatattttgaatttatgaagatcagcataattgataagattatttgaagataagattaagtgaagaatcctgaagattgatatcattcaagatgacatggaattaagaagatttgtttctatctcagcataattgataagattatttgaagataagattaagtgaagaatcctgaagattgatatcatttaagatgacatggaattaagaagatttgtttctatctcagcataattgataagattatttgaagataagattaagtgaagaatcctgaagattgatatcattcaagatgacataaaattaagaagatttgtttctatttattttttagatattatgtaaggagattagaagattgatcttgccaatacatttatctttaagattgcattcaaaaataggatagaatatttttaatattgcattcaaaaataagatataatattttaagattacattgcataatataatagaatatctttaagattgcattgcatgataagataaaatatttttaagataaaatagaatatcttttaggaattcattggataaaatcatatcattaaattagtataaatagacaaatactcttgtgtttagagtgatgcaattccattccaaataatattagagtttcagagagtttgtgtttgcatcattgagagagttgtggtgagatcatatagaagcatttggcaagtttgattcttcaactctccatcaggatttaaaggtacctatttgcttaaggaatagaagcgtaaaggtaactatttgaattgtattcttcttcttgactttggaagaggtcgcaactggaaaactaggataccagtttttgtctctgttcttggtgaattgagacgtgcgacttttggctgggaaactaggataccagtctggctgggaaacaaggatatcagtctgtctctattcttggtgaattgagacgagagctttttgctgggaaacaaggataccagctgggataattgttgtgtaagggtagactaggaaactaggatactaggaactcttgtacacaaaattatcatagtgaaattgtccattggattggttatccaatttggacgtcgtggttttttcccaattgggttttccacgtaaaattgattgtgttatctttatcttttatcttcatattattgttttgaatttgattttaaattgtgaattattttataaactcaattcaccccccctcttgagttcatctggggccaacagtgagtacgtgtactacttgtgacgctttaatcaatgaaggggttaacaagtagtgaagtatgtatgggtaggtagaattggattattatactttctaagtgaaatccctttatactgcatggtatcgtattaaaataaagtaataatatccctaacaagtaagaaaagattaagggtattgttttatgggaatagagtagttactcgaattccttttgagatttaagataaatttattatctaaattttgcaatgaaattgagaaaatattggtccagaaaaattgctgtttaataagccaacttagaattgtaggcaatatatcatatatgttgctatgctattgcatgctatcatttggtagcaagacatcattatggtttgctatggtattgtgtttcttgtgctaacacctcaggacaatgttaggtttccaccctaggtcgtccgcggccatgggtgtctttttatggcatataatttggcttagaagaatagaaatggagaggaaagaaatttaaataataatgtatttttttttaaaaataacttataaaagtgataattcaaatttttattattttttacttttttccattcaagttttactttgttcttgcctcttttactctctttatcattccaaacacataattgtggtctgtttgttttaaaagtaaaaaggaaaaaatgattgtggatagaggaaaaacaccataaagttcattatttccatgatttggaagctcttgtttttttttttcatcgacaaagaatgtatatttatatagagtacaagaggaaaccaaactcatacagaacactaacgtatatactagaagatagttaatgcactgcttttatacacaagaaaggattcacaaaccaaacaaacaaaaaagtaaaaaataacaccattcatctcaactaataaccatgaccacgatctaaatttaataaggtgaaacatttatggtgcattatcttgaaagataatattatttccatgcaatcatatagaccattgtgtgacaacccacaccaagccaattattttttacccttttatagcacaccaatgttgtgaaaaattgttcctacaatcatagggcatcacgacttgaaacccaaggcatttgtaacatagttgcatatatatgaatgagaaggagcatgtgaacatatgatgagtagttgtttcttcctctaggcagcaaaaaggacatcaagtatcattgttattcaacactatttctttttattaagttctctttaatttgtttgcatcatgtctcttgcaatttgaatttgggactagctcatcctacaaaatcaatttttaatatttttatcatatcactaatttatgtgtgatctccaacacatacactcatgtcaagggatacctgccacaactaaaatgggcaagaggtgatcacaattacgatggctttccaacactatgccacatgctcaaagatacccgcttggaacgtggaaaatgcagatgacccgccaattgatttatgataggttttgatgtcattttacaaattatttttgagcttaactcaatcctacacaaattacttttaaggtgagggttgtttgatatataaatcgtattttgtatgcattgggatacaagtttttgccctcaattagtttattttatgtaaactattttagtagaagtcgcgtttttgaattatgtgtgtaacaggaaggcccccaagagaataaacatgaaaataactataaaaaaaaatgatgatttggagaatatgtggacatctcctgaagagcacacccatgttttattcagaacacccatgctatttttagaacgatcatgctctttttagcacagtcatgttcagtttagaacactcagagctataacagaatgatcgttctcaatttctagttaaattccaaacaatgttacaacttcttgagaacagttgggctcttaagagcacgatcgtgttgcttctcaaattttattttcaaagttgtccgccaaaacaaagcaatcatgctctttaacaacatggtcgtgttcttgtctgtgttagttacattttattttataaaaggggaaattgggtgagggatttttattctttttctctattcacaaaaattggaacatgatgagtgagctaggtataatgtgggagctttgttggattggagagaacgtgagaagaattaaggaggctctaacatgtaatttctcttatctttctcatggattgaacacaattccttcaactattgataaaagaccaaattgttaatttattgtgaattgaattattacgggaatacaactagtgttttgggtatgatatcgaaatttaggtccattgttacttcgctcattagcgatcatattttacgcattaaagtgagagagaaaaaataattcgatattatttggttgaatagagaaatataaaatagtaaaaatatgtctggaatccactaaaaatatctctcctttgtgaaaaaaagaagagaggaatgagagattaaaaaaatgaaagctatcaaaaaattacaattttaactttgttatttcttctctatcccacaaaatctagatatagtaagaataaatatgtatttataagaaaaaattattttctttttctttaatattcaatcaaacatgtggaaaaaactcaattttttattatcaatttttatcaacaaatgttagtttattaaaatattaattttgttaacaaaagatattaaatccataatattttccatcgttttttctctcttttaaccatttaatacacattatatcttaattgtaactttattgtataatactactatataaaatctacaaagtagaaaatgtttattattatttttttgtgtaagataaattaatgttcataattataattaaactttagaaatagatctccaataccaaagaaactttagaaatatatcttttgataaaatatttggaaattatttttaatgatggcaagttaacttgacaggaaaatctagtgactaatgcccccaggttatgacttatggctaggtcatcacgttatataaatccttgataagcataagcctaacttgtttccaaaaatataaataataaacacccactgttaggatgcatgcatcctctcttatttcttaatctgtatttgactttattagtcgtctatcatcttcatcttctattatctaaacttttcacttacacgttgaacttgaaaccttcgtcattctaatattagtattgtgcgctataaaaaaattgaaataaaaaagtgtggaaacaccaatggaagcccactaatactgcaagacatgtaataatgtcaaagacacaattatatcagacaaaccttcattaaattaaattcaaatattaaaatctcaattgttatctataaaatttaaaagaatgtgtgttgacactcgtataccaaatgaggactattttttttattacaattgtatacgcttgagtcacaaactaatattattgtcctttttacaaacataaattaatatgatttataattacctaagtttacccatccataatttttattaaaaatttaaatatatgaattaaaaatggtatagaattttaatttactaaatcttatttaaaatataatttatcaataaataaactattatgtttaggattaccttcttctatctctctctctctctctctctctctatatatatatatatatatataaattacaaaaattgaattattcatatatatatatatatttgaattatagtataatatattataatatttgatgtattagtaatatattgatttcttatatcaatataatttgctggttagtaaactatatcatattgttagtttaactaataatatttatattggcaacttaatttctcctaaatgaaagttatatcttttcaatgccaaattattaatatatgttagattattagtacatgataatttgttagttaaatttgttggtgccattttgcttcattaattcagcttgccctaataatatctatgaggtggttgctatcagatcatcccgtgatctaaaagtggcggtctgtacgtcacggaggcaccgattagtccattttctaggccaaattaaccttctttcaccatcccatgtggtccaaattaattaactgaatattattttttttcgtatttattttaatcgtaacatgcttgctctctctgttttcagatacaaaaaaaaaaaaaacccaaaataaacaagggaaatagaaatgtcgaaccgaaaaaatgaaattaaaataaaataataaagttatgatcacgttatagggaaaggcactaattatatatatcttgtataaatatattaaaaagtgttgttgaggtcggctatggatattagagatgatggtttttattatactatacatatcgatgacttccatgttgccctctaatcatggggatgtcaacttaaagattgttaaatatataaattcatgcaataaaatgacgtttccgggttaaataaaatattaccattatattgaatgtgtagaagtaggcttttttttatgaaattgcttgaggtgtgaggtgtcttaagaagagagaaaagaacataacagaaacacatacgtaccctttagccaacaaacaaagaaaaagaaaatgcgagagagagagagagagagagagagagagagagagggaaaaatatttgaaagcaatgaattaaaaattcaagtagggaaagagtgggaagcaaagggttttaggcaactttacacttcatacgggagaagttagaagtaggagttgttattgttatgtaatgtaatgttattaggcttcacatggggaacgtagattatataaattaaataaattactataaggcttggccctgacatgtccaaatcatagtttccataaagaattcacaagaaacctaagcatgtcccccttctttcctgccacattgatatgtgagcaatttcaattttgtctaagacaaccaaagtactcaatttttttttttcttttttaagttcctatcatgccatagcgttttccattattgttgccccacccttcaaagatcaaacatcttcatgttcatgttcaattattcatgggggaagtacattgaatggaaagtgatggacattgactgtgcaattggggtttggccctttgcacttttagacaaaatccctttgagctcccaatggagtatggtgaaaattatgccccatgcatgatgagagagtaacttacttggacaatagaacacgtcaaataataaggctgtgaggtaaggatgttgaagcatgatagtggaaaaaaaagtgtataaaaacaacttagcaaagcaaaagttcagaaagtatgtctcacttgtaaaggaattgggtttctatctcccgcaatattattttcagatattaactaactactacatgatatatggtgtttctttcaagtaatgtaaaacaaaactattatatagaaaccttgacaattaagtcagtcatgttcctttatggaaaaccattgtttaatttaggtcctgcattcattgtttccatattctattactggttacatacctaattattattctacttaaataaaagtaaaacaaactaattaatttgtgaaaaatattgctgcatcagggaattacttactttttttatttgttttttgctacggcgtttgagatttttttatataattaacatgaaatattgtactattttttttcctaatcataacattaattttgcattagttcaagatattttttcaccaactcgtactaagcttaataagatataataaatttagagtttaatttgtatgtaacgtgagtgtaaaccaataaaaaatcatagttggtatgatttttaagattataaatataaaaattaataaacttattttagatgataatttgtaattaaataataatataaataaattttatactgtaacataatccagaaacctattaaaaaggaaagggtgctaatcttttttcttttttttaattgtttaaatgtctaatttttaaaaggcttgaatatatttttgatccctataaattagttttttttttttcatttttggtcttagtaaaattatttttttaattttaatccttgtcaattgacatttttccaattttgatccttataaaatattttactcatttttagtccctataagtgtgtattttttcaattattcatgtaagattctaaaattttcatttataatcctaataaatttgaatttaaagaaatcaaaattgaaaaggtgcaaacttacataaattataaatgagctaaatatcttacaaggaaaaatggaaaagattccaacttacatagactgtatatgagaagtggagtggaactcgggttctgcaggctgtcctagtatatagattattattttcataagtatttagcatttaattaactaaataattgtaactatttaaacgttaaaaaacttaaagtgcaaaatcaataaatagcttctttatacccccccccccccatctctgtatataatatgtacatacaatttaagggaaaaaaaaaaaaatatatatatatatatatatatatataaacgtttaaaagcgtgtcttattgtaactatatgttgcataaaatgtctcttatggcaaatatttaaatagttagccgtgcctcagggagggagcaaccaactgattcatttgcatgtgatttacggacaccaacacatgtcatcactttacaaagggaatgtttttttatttagtgacgataccagtagcacacaaatttggttgaatgtaaattattataacaatgttaattaaaaaactatctatttttgcattgcacataatatatattaatgtacgctgtaaataacacaaataatataacacataaggactaatgtcttaaaaaaaaaaaaacatgagtggagcgaggaccgtgtttgagagaggaggcaatagggggaccaaggatcaaagacgaaatgttagtatagggtaacacaacaggatctcgacattctattttttgcaattttcggatgcatatgggagcaagatctcttgaaggtgtgttttgacaatggggtaaggtctgtgaagttactatagccaagaagaagaacaaatgggggcgcgcatagatttggatttgcatgcttcaaggatgtaggaaacatgaagatgcacgtgaacaaccctaggtataagagatattagcaaggaggaggggagaacaagtatgtgggagacagcaataagggtaaacaaattagccatggagaacatgtctttggttaccaactcagagataagagacaatatgcctaagtggtaaaaggatggaagcaacaataaaatcaaagcatggcaacgggggaaaaaggaggacaaacagacgcaggatgtagattggaagggatgttgggtgggaactctaaagaacgtgaccttaattgacaaaatccatcaggtaagtttcctaacttgtacgggggaaattggactaaaatgtcttgggggatgacttggttttagtggtggtggtgatcatacatactagaaaaaggcaggggaagaggtgctctggtacatatttcaatcactagagaaatggaacctgaaacttgtccctggtaaccgattgacttggatttgttgtatgagtgaaatggaagtacataaagaaggctattgtgaaggaaagtggtgcaatttgtgtatatttaagagaccaaaaagaaacaataaaaagggagatgtgtcaagcaatatggggggagtgtgaagttgaatggattatgcaaccaactattaacattgcaggagcactcttatgtctttggaacaacaatttatttgttgctagaaatttgtttcaaggatgtggatttattggagtagagggaactttgaaggaagggggacatgatgttattttactctcattgtgacttgaaagcaaagaagaggcaatgggaagctttgaaaagtgtaaggaaactagtagggagtctttatagtttatcattggagattataattgcattaggaggtcttgtgagagacaggggggcttagtagactatggtagtggtgaaaggaggggatttaacaaatttatagtcgacatggagttaaaagacatttcattggtgagttaaaaatttacttggtaccaaccaaatggaaaacaaggtgtagggttgctagatgtttggtgtcaagagattggattgctatgtggcccaagagttcccaaaatgtgttggatagaaacatatcagactattgtccaatattgttgaaggatgtcaatgtagattggggacttaaaccttttaggaacctagattgttggtttgaagacaaacaatatggaaaattggtggtggatacttggtcaaatcttcataggcatgggaaaggggatttcatccttaaggagaaattgaaggggctaaaaggaagcctcaaaaagtggaaccgaactcactttgaaatatcaacaataacattgctacaattgaaagagagttgaatgactgggagaaaaaagagtgggttgtttgaagagaagataaatacttggaggggctttcaagatgaattttggaagaatgtggtgtataatgaatcactactaaaacaaaaatcaagatctaagtggttcaagaagggggataacaactcaaaatatttccaaatcatggtaattagagaacaacaatttcatcttattgatttttacaaaactcattcaattccaaaatttcaacttatccaagcactatctagtataaaatttgttttgttgaaagagacaaaatccactcctatgatctctttttctagcaggaatcatactttgactgtcgattgaaaatattcttggtgaaaacaaaaaaaaaactaaaaaaatttatttctaacaaaaagttaaatgttttattcagatgtaatattttgtattaatttgtatgtatatataagtaaaaaaaatgtctagtatgtaataaaatgtatcattataataaaattgtgtctatttttgtaatgtaatatatgtttataatgcttctatataaagtgtctttatcaacctttttgccttgggcccataatatataaaaattagcccatattttaaaaccaaaatctaaaaagacacgaatttctcttatatctatgtgctccgccttcaaaaccctagccacaatcttcaattgccatctattgaagatgagattttgaatcttcgcaaaaactcactgtcatctcaatattacccacaattactcattcattctatattatgggaagaagcgttcaacgatttgttatctcttaatcgtgactcaactttaggttctacaccctttatctcttcttattttttctcaatttgaattcttttttttcttggtgctatttgaactcatcgattattatataatttattgaattcgaattggttttcaagttcgatgtatttccaattgttacaacatccgattccacaacatattcacagttatttttaattaaaaaagcatgacaatgaaatggagaacaaacttagatgcttattgctaccttttttaatgttagagaataacttagttaagtttcatttgttgcgagccttgttaaataaatgcattgatcttttgaatattgatctttctcatataaaagagatattgattttatattcttatgaatgtgaatcatttgattacatgttcaaatgcattagctttttacttgcaagagagtcacattccaatggtgatgaagatggctcatgacaggtaatcaagtggtttacaatgtgaataattttttctattaaaatttttgttttgtttgggtggttgatattgatttagatggagaaagtagtgttagtaatcaactaatttttttacctttggatagtataaaacttattgaaaatatggtttgtaattaggtaaaagtaccataaattaaaaacttaatgttactctattaaatttgtttgtgactagagaagttgatttaagttttggaggcaaagtaagactttcaagggatgacatatgaattgtcatttcattatgtgtgaaaatctaatgacttttgtttactaataccttaataatgtagattctttgggtgttaacaacaatttggtgtgaaacattaataaggctaatttaatttttaaatataggttacatatctaaattattttcctatgttattatttcttttttctattgctttgagctgacatggttatactatctgcttaggatgaattaggattagttaatggctctattatgcctatatttgtcacttttgggtgagtcgtattcttcaagcaaataattaactgctcataattgtcttttactgatcgatgtgacttattttctattaatattataatatcatggatgtcaagtgcgacctcctttataggttatttttttttctattgctttagtcgagcttacatggttatactctatgcttggtatgaattaggaccagttaagagttctatgatgctcgtatttgtcactttttggtgagctttattctttagacaagtaattatccgcttataattgtcttttacttattggtgtgtcttattttctattaatgttataatgtcattaatggcaagtatgacctccatgatattgcaatatgatattaaggttataatatcaaggatgtcaagtgtcacaacacatgcatttggttgttgtaaccttaatagtcttaataggaaacatgatatgtcaatcaataagagacaattataaccaattaattacttacgagaaggatgaagaataaagcccacaaaagtttggcaacaatgagaataatataaccataacgaatcttaattattctcaatcaaagtgtaatatcatgtaagctaaaagtaatcgaaaaataaagaagtaataataataacatgaaaaacaactaagatagttaattatttatttaaaagttaaattatccttattgatgctatgtcccaagttgttagcacacaaaggatctacaatattcaagtattttcaaacagaatgtttctttgagttattgattgttaggcataacaccatagtaggattcgtaagcattaagaaatggttcattaactaactgctatggtgtcatgcttagcaaccaataacttacataaatcttttgtttaaaaataacttcaatattggagatcctttgtgttctaatttcaatttcaaatataggttacatatcttaattcttttcctctgctactttcttttttttatttttctattgctttgagttgatatggttatactctatgcttaggatggattaggattagttaagggttatattgtgctcacatttgtcacttttgggtgagcttcattctttaaacaagtaattaattgctcataattgtattttacttattggtgtgttttattttctttaatgttataatatcacgaatgtcaagtgtgacctccatgatattacaatataatattaagtctataatatcaaggattccaaacatcacaacctatgtgtttggttgttgtagccttaatagtcttaataggaaacacggcatgtcaatcaataagagacaattacgaccaattaattacttacctgaaggatgaagaattaaacccacaaaaaggtggctacaatgagaataataaaaccctaactaatcatactccatttctagcaaagtgtaatgctgtgtaaactaaaagtaatagaaaaataaaaaagtaataatagtaacatgaaaaatagttacttatgtatttaaaagttaaattaccctaattgatgtttcgttccgtaacaacccgtatgcatccggttcattaacattcaactatggccattaagcgcagtaattatctaaggtaattaattcagaagtagtaaacaaaatgacattatctcacgtcattaaccacacctattgtatataatatatggtgaattctcataatatacaatatatatgtatcaaactgtacatactcccctcagggtacaaaataacaggcacaatcaaaataattgagccaatgagctctcaaaatctatgcctaaggttcacatagaacctatccctacgcgggcctcttgctctaggatccaccctccgcttcctaagaatcacctgcaaaacatataatccctaacaggggtgagataacaatctcagtaaattcaggatccttggaggtctttcctccccctcattcacttccatgaaataaaatattaaaattggcatcatacacaatccagtcatcatggctctcaaaacatatcacatgtatatcataacacagatacaacatatacatatagatatatcatattgcttgagaaagatcatccgcaacgggtacattctcccaagacttactcggacatatatggcacttctgagagaagatcatccgtgacgggtacattcctctcaggttttattacatatatttatattgaccacttagagttgttccacgcaactttggctctaagggaagtccatatttagtccattctactagccagagaatctcatcaatcacaccacactatcacaatgtacataatatacatgttttcaataaaaaatagtaacacacaatttcaatatacatgcatcatggcatacaataatcatcactccctctgagtatggtggaacacagacaatgaaaacactcccaagaataaagagcttacctgctctgagtgttacaatggctctcccggcctcatggtcacactcaccagtaacctctgtatcacgccctacataaaggcatacgagaatcaatcaataacggttctcaaccgttaaaatgaacagaaacattattcttctacatataaccctttattactctatctcaagtctctaaggctagtcacttaactggtgactgacagatcctcacaaggatctatctcagcctaataaaggtactagagtcactctaaaaccctgcataagccaattcaatgctctaaccagactatatatccatgattatccaacttggctgaaacagttattccaacacgttttcactgtttatttagccttctgaacaacttttgtaaaacacttaggctcatatttatcatagtgccttccatttaatcaacattttccctactcatacatacttcagagtcaaaatcaaactttatcaaaagtcatgtttcaaagttcaatattcatcagaacaacctcctgagcatactttgctaaagaatccaagcctaatttcagctctaactcaaaagggttaatattcatcccaaaaacaatttcacaaatcaattggtaaaacttgagtttcttacctttaaatcgttgaggaaggctaaaggataacttctctaagcttgagtgtccttgaaacgcctcatttcccttccaaatttcagctttgagaagttccctagagaactggatttctccaattgatggttttctctaagaattgagcttggaatctagctcatagaggagttctaatcaactttttagttgagtgaaaagtgtttagatgaaggatagagaagatatgaagcttctttggtcgttaatggcggaaatggctgaaggtgggaaagaatgaagattttctctcccaaaacgttcaaatgacccttttataaagccatgcccgtgttcccacgctaatggcgccagcaattttttttgtcttttttggaaatcatggttattatacgtcccaagttgttgttagcacacaaaggatctataatatggaggtatttgaaaacaaaaggtttatctaagttatattttgttaagtataatgctatagtaggactcacaagcattaagaaattgttcattgaacatttgttatggtgtaatgcttagtaacaaagaacttagagaaaccttttgtttacaaatatcttaatactgtaaatcctttgagtactaacaacaacttgggatgaagtatcaataagggtaatttaatttttaaatacattgttagttatcttatttaactttgttacgattatttcttctttatttttggttgctatgagttgacataattataatctatgcttaggatgaatcaactggcttaaatacccctagttctagaaagcacatgagtttgaaaactatgttgttaagggttctattatgctcatatctactactttttcgtgggattcattctccaaacttcaggtacgtaattaactactcataattgtgttttattgattggtatgttttttcccctattaaggctataatatcaaggatgccaagtgtgacccttatgatattggaatataatattaaggcaattatatcaaggaggccaagtagtaatagtctgtgtgcttttggcaattcctctttgtcttccgttatctatttattatatgattttcccttcctcttttgagccctaggttgggagacctaggaattttaattattatactttattaaggggtttattgtgtaaattaactagttaaaatgtaactgaagtgattaggaatttattggtatgctttgggattgtttggaggccatggatggccattgagagtgtggatttgtgatttttgcaaaagtttgtaggtccgtaaagcttgttgatgcatgctaagcaccatgaatttcttggattcaggtttgatgacttgtgctaagcataagctatgtgtgctaagtgtgagtgctctgtaggctaagcattacctttgtatgttaagtgtagggacctctagagagcaagtttggagcccttgcattggtgtgctaagcatgagcgagtgtgcttagcctgaggtttttgtgtgataagcacctaatggttgtgctaagcatgagactcctagggcaacctagtaagtttaactcagtttcattcatatataatcaatgttcttatattataagtgactgtttgggataatatatgattgttgtggagttttcttacatatgtttagttaaaaaaatcatcctataactctaacatatttattattaattaaaataatttgttgagattgttttcaaataaaattttgatggatttcatcatttcatgcaatatcatagagggatccaataattttatagttgcctcacctatttagaattaactccagataataaggaaatgatctcataatatctagttgagaaaaatattttctaagacactttttaggaaattataaatgattttagatttcacttcttacttaatgaatatccattatcatcaaaataagtgtattagaaaatatattattaacatttcatttttttatgaggatcccattgtcttacagtagtaggaattattaggtataaccataaaagaagacgacggtgactaacctttctaggaattcataatatctcaagactctaatattggagcactaattgacttgagttggaatgaattttatatatatccctcctttcacttattaaaacttgaaggcaataaggaaattgaaactcaactgtaaataaaaagaagaaaaatcaaaactccaaaacttgaagattatagacaatgtgctagacaccccaagcctattttaggtcatatcaggttaaaggttttctcctggaaggcctctctcctcttaatcataggacacactcaattggttaagtccattgtcaatgacatgcttttatactccttccacatatatttttggcctaagcagctcctcaaggaggcggacaaatggattcttaactttgtataggcgggtgatctggatcagaaaaaaatttgcattgttaactagaagagagtatgctcactttgtgaggaaggtgggttgggcctcagacctatctctagcatcaacaaggctgcctccatcaaactttgctagaacttcctttattctaaagctcaatggatcaagtcccttagagcgtgttaccttaagaataagtgtatggccatttcttacagaaaatcctctttatggccctttcttaaatgcaatattccttatttgtgcaaaaatcatcttgggtcattcgttctagttgctctgccaacttctagaatgacccttggtgccttgatactcccatctcagattttcttggtattcctccctcaaccaaaaaatatatctcttcttctctgagagattttatttctagaaataattggtgcatttcatatatccttttttctaaaatttctcctttggaataggccattcaaaataccatatttgttccttctctccattaagacaactctgtttggtgtgatgctaataatgatgatctcactttcaagatggcttataacgttatttgttccccttccagtcctactctctgagtgaagttaatctagtctccagctctactgccatttagatcctttttggcttggagaattcttcatgataggatgcctacagacaaaaagttaaggcaacatggctttgttgtgctctctatgtggttgcactgaagaaaccattggacatctcttattcgattgcacttttgcttgtcatatctgtttgtggctagaaagtaagatttccaaaactttgaatttgtaggattgataatctcttctcaacattcttcttcttagataaagtggccatgctaaggatgtcatcctatctctcaagcttaattctctttgggccatatggacctgccccaatcaactaaggtttgacaacaaagttgcttctttcaataaggttatcatttccatctctactaccaccttcatagcaggttcttctttgacgggcaagctaaagcattatgttgaagaattatctatcctcaaatccttctttgtccccattcacccccaactcgcaattggttaagtaggttgattggttcccttcggtgctcaataacatcaagtgcaatacaaatggttcagccaagggtaggggtggaagtaggccaggccaggctttggcgggcctaagcctggcctgtatcattatgattaagcctaagtctggcttgttacctgttaaaagtaatttatttaggcctgagcctggcctgtataaaagtctgacctggcctaaaagcctgtatacaaggcccgatcaaactagaataaataatttaaagtaaaaagttagcatgatatacatgtttctcttataaaatataattaccaaacatgatattgttctaaaaaaataagtaacaaaccaaaagtccagaacaaataaaattcataacaaaagtctcataaacataaatataaaagtaattcatatgataatatcaaatatgatctcaagccacaaatttaaaattcataactaaagtttcaaaatcataaacataaaaagaaggtctcaattttgaaattacaaatcaaaaacaaaaactcaagtctcaatcaaaaacataaaagtaacataactaatgatatcgaataaagtttcaaatcttcagattgaccagcattaagagtaagacatcaaatcttcaaattgatcactttaagttgttcattcacctacaatacaaggataaattttattattagaaaaatcaaataagttaaataattacaagaatggaccataaaattcaaaaatattaaacctttttgtagaaaataagaaacactcacaattaaccaagaaggggggtgaattggttaagtatagatatttaaaattttcttgttcaaaaatcagagttaaaaatgcccgttggatctttatcacaaaactaaatgaatatccttatccaagttcaatccaagacttgttatgcttatattttaaacacacagaaaacagagttcaatcagaaacaataaagaatgcagtaattaaaataagaagcaagatttatactggttcacctcaaaatttagaggctacatccagtttcttctactcaacactagagtagagttctactattgaaaatatatttcttacaagatattacaaacttctctttctcaaccctagagaaagttcagtgatctaaaaccctattagacccttagaagctacacccaaactgagaaacctactcagttgtacatggaaaaaccctatctcccttgcaagaaaaccaacaaaaacagagttactgtagaaaaacgaaatacccacaaagatttaggaaagaattcacttgatgatccaagatagaagtgcatatgaatgagaaacctcaggttgaatgtaatctaaagatgcagaatcaattcttaagcctttgtgactgagtaagcttgcttcactaacaatcttagtgacccatcaatgaatcattggaagcaagattcaagaatccagaagaaacctttgtgaactcttagatgcctttagagaatgctcagaaatcgtaaaaaatcaactcagtaatgatctctcttagttgttaattcaaaaaggcaaagggttctatttatagttgaaatcgtaacagagttaatcgattaaatgcgctccccacgctcctgtaatcgattaaaattattaatgcagaatcagattttcaactaatggttaagataatcgattaacccgatgcgtaatcgattaaatcagtttgagcaaaaatactgatagtaaagtgtaatcgattacatccaattgtaatcgattaagtcagacatatgctaaaatcaattttatgaagaataatcgattacatccagtggtaatcgactaatgcagtcctacacttaaatcatgtttgtgaagaataatcgattacatctaatggtaatcgattaaggcagagtgactaagtttatccaatgagcatgtaatcgattacaacaccatggtaatcgattaaagcagttacacgaccaaatttcaagtatgctgagttgtgtgtaatcgattaacccgataaggtaatcgattaaagtgtttatgcttggttttccagaaaccttaagaacaaaataatcgattaagatttagccagtaatcgattattgcttctatatgctgttttcttagctttctcttaagtttctaattaactacttaactcctctatgatgcaatacttaaatgatacatgaatgctataatggcttggatcatcatgatgctttcaatccttttacattaaatcacaaacaatcgtcttcaatgcttgagccatgttgaaagccaaaactccaagacttgcaccttgattgaatcttcacttgatcttcattcagctccccctcaactcaacactttttcttcttcaagttatatttgtgacgaaaccaatctcctccacaaatgagagcttcaatagattcttcattcaactttgatcggtattcatctataactctccctccagcactaaaagtagcctctgatgcaacagttgagattggaatggctaatatatcaactgccatctttgataaaatcttatatttgaaactattgttcttccaccactccaaggcactaaaagagaagctatcactttcagtaacacaaacaccctcttcaagataaacatccatttcagatttcattgaagggacaacttctttctctctcaccatattaattatttcatcaaatccagtaataattgtggacttgcacacagaattagaagagatggtgctgccactagtattcccttcatcagtaaatgattcttcaacactcaaattaacatattcattgtacaactcatacaaagaagaccgaactttattcacattatgattaataagttcttcagacttaaatatcaaaggaaaacatttgtcaataatgtgaaatttgcaccttggatctaaaacacttgcaatggccatcaacagattgcattcaccccaatatttatcgaacttggctctcataggaactgtcatttctctcataaagagatcttcatccgcagctgcagcatcaagtacttgtttcaccttccaaacttcagcaagatatagattggaagtaggatactcggtccctgaaatgacatgcgtggcaagattaaatattgataaaagtttgcaaactttgtgaactttctcccaatcttcaggtaaaggatcatagttataaagtggatctctttctttataggctgaaaaggcaatcttgaagttcaatgcagttgatagcatttgatatgtagaattccacctaaatatatggaatcattagtaccatgtaaaataggcaacaataaatgtactaaaaagcatttaaaatataaataaatttactaccttgtaggacaatcaataataagcttcctttcttttaggtgcttttgttcaacaacatcactaaatgcctttaaccttgaatcattatgattgatgtatgtcacactttcacgaatgttgtgaattatggttttgatcttgctaagaccatcttgcaccaacaaattaagtatgtgtgcacaacatctaacatgaaataggctaccatgaagaactagctttgtgctcagtgacaaagtatcctttatatttttcaagcaagagtcgttataagatgcattatcaacggacacagaaaaaactttatcttcaatcccccatgccttcaagcacttgaatattgcatcagctacgtcaataccacgcctaggagcaggtacttttacaaagctcaaaacccttttctgaagtttccactccgcatcaatgaaatgactagttataaccatgtactcaactacttgatgacttaatttccacatatctgtagttaagctaatcttggatacacctttcaatgttgccttcaatactttcttctctgcctcatatattgctaaacaatcattccttactgttttgcgacttactttctgaaaatcagaatttgcatattggaatgcccacatccaagcttcatcctcaacaatgctaaaaggaaactcatgtaccataacagcagttgcaataatttctctcatcttttcattagagtatctactgcatgtattaacaaatgggttagttgaattggaagggagaaatggaatgcatggttgtttcttttcttttgccatctgtaacctcctttgcaagcaaatttcactatgcctcttaagatgacttgtgctgcttcccctcccaccagttgataaaagggctttgcaatacttgcatgcaacctttgtttcacctttagaattcttaacttcgttaaagtcatgccaaacaattgaagtttttctcctctttggcttgatgacagattcttctccatcaccatctctggagttgtcattgtcatgtccattagcttctggtgtgggttgagtagtatgattaacaggcacattagtagtaggcgtagtttcagccatcaaggttaggtttccttaatactctgcaacagaacagcggagaaggaaccaaattaatgacactgcaaacttgaaatgttgagtataaggatcccaaacaaataaaccggcttgtttctcatcttccactgcagcatttacacaatatagaaacctttaacaagctatgcttgtagctggaatggtgcattacaatgttacatactttgttcactaaatagcattttgaaaaatatcaccataactagagaaaattacagtgaagcaacaagcaaacaaataaaccagtgctattcataattttaaacggctcttattctaatcaacaagtctcttattcttcctattccaatttgaaaaataactataaaacttatagataaattcctatcaagaaattaccaatctgcaaaaaacaactaaccatctaatattgattcaagaaacaaatattactcagtgcaaaaaagtaaaatctgctcgtgaattcatccttctatccatatgcaccattaccaaacccattattctaacagatttgtattcagctgtacccaacataataaattaagtatgtatatgatgcatgatgcaaatttgtattcagatgtatgaccaaaatacaatacaccattgaaattaaaaacattgtattccaatttgaaaaataattataaaacttacagattaattcctatcaagaaattaccaatcaaagaaataagattcaatcaaagttaggcatgaatacttttaaattcctataaaacactattctatgggagaattagtttcacgatgaataattttgtggaacttaggcatgaataaatttgtaacaacatccctcacattcattagccaatgtctattttaaccatttacaaagttattacacaagtaattaaacaagtcaagcatacattaaaagtaagaaggctggctttcggaatttccaaataaaagctggaaaaaaaagaattaaagatattcttacagtccaatgattatgacaagttaaaggggaaattataagctttcacttgaggagataggctggctttcggaattctgttagcgttccagtgggtgcaccagaaaaggtttcttcaaatgattttccaccaatagaaaaggtttaggcattattaaaattaatagattaaaaactaaaataaagaagtgttaattggtacacaaaaaatttcacggtggaagaaaaacttgccccaagttctggattttctttctccccaaattctgtgtttttttttttgtgttcaacgaaaaagaaattagggaaagcatgtaactttgtagtcaaagagtgaagggtaatctattcaaagtagagagatgcaatgttcacagcatattggacagcagagagacacaatgtttactcaatattcacaaaatcacaacataagcatgtagaaaataaaaatactcacaaatcacagagatgcgcagcagataacggaggacagaggttctccttcttgtcgttgtcgttgctgttgccgggatgtggtagttgagaagatgacggtgcacggctgaggtaggaggtgaggaatgaggacttgtgctgctctgttagggtttaaagtttagaaataaagttgaaagtgaggaatgactgaatgaggcacaaatgaaatagatggaccaagaatccgtgagcgtaaatgtgatttatacaggcccactattcaggctttgtgagctttttttaaagcttacagcctcgccttttaattaaataagctttttaaaaagctcaaatttagcctttttaataaacaggctaggccaagccaggccttaaccaggccaggccataggcccctgacaggctgtctggcctacttccacccctagccaagggtaatcctgagtgtgctagtagtggtagcatttttagatatcacaacatgggtttgattggttgcttatcttcttacattggcattcaaagtgtttttatgctggaacttttgtagttattttggctatagaggttgttcttgcttacaactggaggaacctttggattgaatgtgactacaacttaatgattcaagcaatcaagaaaccttctttagtcccatggcaactccattctcactaggaaaatggttttttctttaagatatagttttggtttactctcatttcttcagggagggaaacttttgcgttgccttttaactaattatggtactgattctgggcttagctattctttgtgggatcataccctaagttttgttaggcatgaattttttcggaataggacaatttttctaattacaaattatgttaactttttgattgggttttggcctagtccctccaatttgttcattcttttttactttcttttaatgttatttggtgtgatatcttggtgggtttgtatgggtgtcaacttaattgcgatgcatacacatccttcatagatcttacactaactttttatataaataaaaaagaacttgacgattatatatccatatattcatcctttcacttattaataccaggtgttaagttaatccctcaataacgtataatgtttgagtcttttatcattgtttttctacttaggtattagtttggtcccaaattattttataagagtcgatttgatctctaaattttttaagttttaatttagtattttaattcttaaaaatgagtcaatttgatcaattctaccaaattgatactcacaatgttaggataaatttttgacaattttattcataaatagtagcaactaaaaattgttaatgtaatataaaaaacattgatcgttccaatttttatacccacgacgtctctttgtttttagctaatgtaaatcttaaattgtaactaaaatttgtcgattttctattttatgatcatttcaatgcttagtataaattacaccggaagataataaatcatttatgttacaatagaagttaatatattattattattattattatttaatttattttttaaaacctaaatttatttaaataaaatattatataaattatacacattttgtattattagactagctttaatacttgttaggctccgtttaaagataaaataattaaaacttatattttaggtttattagaaaaaaaatgtattattaatatatatatatatatatatataatttttttatttgtaagatttaaatatgaacttgtaatatttatattcatgtttaatcaattaaactagatttttcgatattcctgtttataaattaataaaagtctcatataagtcaaatattttaacaaaaaaagcctaacatattaaagtaaaaaataattttaaaatttatttaacatctagcatttcgatggatgaatactctcaatgagacaatgatcatactaccacgtttgacaaaaaagaaatatacctaaattctacacgcacagtaaattttaccagactgtcacgcagcataatttccttatcagtctaatgaactaggtgatggacatgtgacagtcagaagataattcgctagagaatccaatgaattaggtgaacacgtgatagacaagtaatattttgctaggaagtccaacgaattaatctatatctatcacgtgtcaacctaattcgttggaatttccaatgaattattgctaatctatcacgtattcatcatctagtttgttaagcaaaatacaactcctgacaattcgataaaatttactttactcgtgacattcaattaaataatttttgtttttgtgacggtagtacggtggatgtctctactgtcacttgtgccaactggtttctccgatactatttactaacaccgtaacacgtaaatgcataactaataagtattttaaattgaatttagtcaattgtcatgaaacaaaattttcgtacactgtcacgagcctttgttgcattaaattagaaatattagtagaaatacatttaacataggaaactgaagttcacgcgcgagatgctggagtggttgaaatcaagggtggcgacagcaaccttaccaaccagaggggaaaactacgtatgcagtcaagctgcacaaaaataaattaaaaaacaataaaatataaaaaaaaaaaaaagttgaaacagtgagagagagagagagaacactttaccacttttatacgctgcacgcatctacctcacaaaacacaagcaacaaagagggttccacacagaaaacacaaagaagaatcacattcatttatttcatggctttcttcttcttccctcatcacaccttcttcaactgtttcaatctcaacatgccacggaagaatcagagagaagaagaaaaaacaagctttatttttagagggtgcccaagttgtttttccttttgtttttcctgccgcactctatgtgtttgttcagtgttcctcaaagatttgtattgtccccaaaacaaaaacaaaaattcagcctttttagctcttccaacccgaaatttcttgtcttttgtacgtgttcttcatttggggtggtttaaatttgcttaatttgtaatcttttttttttctggggtgggttgtggggaaacaaaggtggtaccttttgaaaaactggagtcttttgggtggttggttttgtggtcaccaatattattgttcttccccccctaggcaactttcttagatgaaggccatgcccttgccttttgaggaatttcaagggaagggagtgttggatttctcttcagcctcagattcattttcagtgcttttgcataatccacaaccaaagtggaccatagacaaagacgactattgctatgtgggcagcatcactgagcccacctcagttcttgactccagaagaagccttagccctcccacttcctcctctacaatgtcctcttctcttggcagcagcaacaacagcactagcaagggtggtggtggtggtggcacctcagccaacaccaccaacaacccaacactaccctcagacaacaacaactacaaccctcctcaggaatccagccctgaaaaatgtggcatcaggatggaggactgggagggtcaagatcaatccatcctgaggctaatcatgggggatgttgaagacccttctgctggattgagcaagcttctgcaaagcactgcctgtggctctcaaagtgttgatttcaatgctggatttggtgttgtggatcaacaagggttgaatatgaatatggtgagtggtaatattgacccaaattaccctgctggtttccctttcattgctgagaatatggatggccagaatgccaaggttggttctgggactggccaggtttcagaatctgttgttttctctgccaacaatcctctcatggtgtcatcatctgtgtcccctggtgtgttcacttctcagcagcagcaggagtttggagtggtggatgagaagcctcagattattaatacacagtttatgttgaaccagaaccaagttcagttctcagagaaccctactttctttaaacgccatctctttgacacaattgggcacaattttcaagctccaaggttgccccttttggattcagggcaagaggtgtttggtaggaggcagcaaacacagcttccattgtttcctcaccatatgcagcaacaacatcaatcaatggttatgccttctgctaaacagcagaaggtgagttccgccggagacgatgcaagccaccagcttcagcaggctatatttgatcagttatacaaaactgctgagctgatagaagctggtaatccggtccatgcgcaagggatattggcgcggctcaatcaccagctctcccctattggtaagccttttcagagggctgctttctatatgaaggaggccttgatgtcacttcttcattcaaatgctcacagtttcatggctttttcgccaattagtttcattttcaaaattggagcttataagtccttttctgagatatcacctgttcttcagtttgccaattttacttgcaaccaagcctcattgaagctgtggaaaggtctgacagaattcatgttattgatttcgatattgggtttggagtacagtggtcatcttttatgcaagagattgccttgagaagtagtggtgcaccttcactcaaagtcactgccattgtgtcaccctcaacttgtgatgaggttgagctcaatttcactagagagaatttgattcaatgcgcgaaagacatcaatgtgtcatttgaattcaatgttttgagcattgaatcattgaactctccttcctgtccactgcttggtaaattctttgataacgaggcaattgtggtgaatatgccggtctcaagtttcacaaactatccatcattgttccattcagttcttcactttgtgaagcaactcaggccaaaagttgtggtcactttggacagaatttgtgatcgaatggatgtaccgcttcctaccaatgtagtccacgttctccaatgttattcggccctgcttgaatcattggatgcggtgaatgtgaatcttgatgtcctccaaaagattgagaggcatttcatccaaccagctatcaagaaaattatacttggccaccaccattctccagaaaaattaccccatggaggaaccttttatgcaatatggattctctccattcacatttagcaacttcacagaagctcaagctgagtgtctagtgcagagggcacctgtgaggggatttcatgtggagagaaagccttcatcacttgttctatgctggcagaagaaagaactcatctcagtttctacttggagatgctgaggactgaggagcagcagcagaagctaattaccttatatttttaaaggtgcatggtaacttacattgcagtttatgtaattgtttgtgtaatttaggcttattgatgagatccacacccaaatgttttcttaactgcatgggttggaatctaccattctatagttctaatattactagtatgtcactttgaacatgggtagtaattatgcctttccccattcccatcatctaaagatgggtaactgtttctttgttatcttgaacacaaagcaaattgcttagtaagaaacgaacaatttagccaagaatgcagcctctattttcttcctcatggtttagtctattctttcttgattaatgtatgatgacctgaatttggaatacatgatttaaatatgtagcatgaaaatcttgtgccaattcaattatccaaataggttgctgggtttgagtgaaaaacgggaaggaatataatgattcatttgtagtctttaaggaaagatgcccaaaacaaattcatgtataatagtacttttgtttgtaatttaagaatttgaaataaatataaaactgggtgttgatttaataagaattcaccaatgtgtttgaaaattgaaatgttggctgacaaaagacataaaacagtttttgaatctggccatgttttgatacaagtcctcgtgcattggattcatactttgatatacgaaaaacgttttcttaaactaccctcaaaatacaacctaaagaacacattaattgcacttgcgttgactctctttttgttataatttataatttagaacatgaaatgaatgatcagaaaatgttaaattttctcttggtctacagaggaaatttggtgatgtcaacgtagcaattatgttacactagagcgacctgagtccgcacgttgcgccattcaattgggcgttacttatgggtctgtttttcaagacataataatgacatagcagttaataaaagtctaatacaagcaaattgtatcaatcctactactattaccttacactttctcaatgaatttataaatggatatataagagttttcagctcttaaatttgaataattttattaagatgttggtccgaatgaagttgagtttggtatctttaagcgtttatttagatcactggtgggacaatccaaaacagagattagagaagcaacaactcatacttctgtggtgaagtgatctcaagcttggtgttgtagtaagtctacgggaaaaacgaacacgcattaagtgaagtctcaattttgagttttatgtacaaaaattcactatgggtggttaattaggctttcaacataaatggatatacaattcttaattttaatttactaacgtgttagtgcaaatgaaattaggttagacaaggtcttaatttcgagttttatatatataaagaaatagttaagagagaaggttcattatgggtgattagttagattttttttttatcaaagattaatcattgacaaaattatttgtagatacttgatactacaattatgaaaatcggtccgatccgattggtcagatcgggatccagtaggttaatcggtctggttttgttattgaatcgtttatgtaattgactcagttaaaatcggtcaaacccgaccgagttcgctttttttttttttggatttttttatttaaaattttggattattatcaattattatttttggattttggagtataaatgagtttttcttactcaaataatgttaattataccaattactggtacaaataacataaagaaatataaccaacgtttattggaaaaagcaaccccaaagagacttataatatatatatatatataattttgaacttttaatatatatcgtatcaaatcagaccaattgttgacttatcaattagaccactaatctattacctcgattgggtcaatgatcgggtcggttttaataacactgtttgatacaaatatcatgtgatccaaaatttgaataaattcaaataataatatattaatttgatctctctatatattattaatatttttttatttaacaatttgatgaatagatgacaatgcaatggcagactattctatccagttcctttcataaaatgtttatataattttttttgacagcaaactaaagaagtaacagccttggataaatttttcctaaagaaaatttccttccttaaaattattgtttggactgctgttggactttgctaactaaaccacttgacatattttaagcaacttacaatttataaaagtttgttcattttttaatggttaaaggaagagaaaagttggtcgatggatgattgagcttcagaggtaaacatcataatgaatttttgaagatttcagcgaatgataattattgccaacgctgaatatatcatgagataaatggtattattatgtatgccaaatgtttaaaggaaacattctttttttatgtcttctttctttttgccatgagactgctattttcagttatttttattggtaagaatagaagataggtattagtacatgccaaagagcatttaattcacattataaaaaagagaatatttaatatactttattaaatacttttaatcattaacgagtagtattaatttttatatttttattttcttaataagtgacttcaaagaagcatatttaaagtaagtattaaagcgacctaacataattaattgaataatatgtgtcagttgttataaattttttggtatttaaattcctattctgaataaaaaaagataatgaaagaatgagttagactttgacattttctaataaacatacaccatcaatgtttttgtaatcactatttaccatgtaactatcactattggtagaatgccacaccatttgttcctctaggatatcctcaacaacttggggaggaagaagatgccttgcctcctctttcttccaaagccaagtattctgacccatctatgcaaggaaccacgtcctgaatgaagaccaaaataaacattactagctttagtatatatagcacaatcgataaacattcactattcattggatccatttttggaaaaccacacacacacaccaattgctttgttgagaatttctcctttactaggctttgcttgtattaatttcgaaagtcatgcctcaagatgatataaatgcttacatttgtaagcagctgcagtgctgcacaaattaccttcgacaaaattggagattcacgttataaaatattttacggttatttaatttacaatataaaatattttatatgattatttaatcataaattattatttatatgatttttaatatatttattataaaaattaacaaatttatcatgtataataatttatgattggataatcatataaaactattttgaactattactacatagtcatttttctcttataaagatgaatttcccacttaatattacatcacattttttttattattttgatatatgacaaagtatattaaacttatacattatatataatatttatttttttccttgtttgcaaatatgttaattttttatttatttttcaatcatgtattatcttttcatttttgctctagaaatttcttttcttttgttttttagtctttcttttttactataatattgtgacattttttttgttgatgtgagacattgataacatcacattatgttgatgtcttttttttttttttatgtgatgtgtgttaatatcaatatgatattaacaatttaacattttttaaactttgacggtagagattaaaaataaaaattttaaaatttataaaaaaaaacaatcgaatttttttttacagagacaaataataaagaaacactaaaatatatgtatgaaaaactaaagcctaaattttatctaaaagccatttggtatctagaagaatgaattaaagttctttcatacctttgtggcttcgttgttatattctattatagtacaccttatgccatctttatcatatattgattatggaaaatgttaacaagtgtttttgggtagtgtttaaggagctataagataagtgtttttattggaaggtataaaattatattatccaataaatattttattatttttgtttcttaattaatgttagttagcaagactccttgattattgatctatctcatcctttctttaagttgggtttgatttggggaggaaaaagaaaaatatgagagaaattttatggatttcatatgaatctcacaccttttatattttattttaataaaaaattcttctatttttatctttttttatatttttatcctcttaatcaaagacaaacttactacattaagaatgacaatgggtagtaggattagatatgaataagggcaattcgttatcctctcgttgaaaaaaacctaccctctaaccatccattacttgttgggtatccgtttaaaaatactcacgaattttcatgatacccatgaatatccatgggttcaaatttaaagttaaataattttttccataaaaaaggtcgtggttcgtgaacctctgtggttgaaaaagagaggaacaaagggtgaagcgttattgactactgagagattgactactaagagagtgaggggcaggggacttagggtgtgaatgatggcgttgcttagatttaggaactagggttatatatataaggatattttttgtaatttcataagtagtaggtagatatgaatattatgatactcatactctatccattaacaaagagataaaatatatttgtatccgtgggtgatcaatacccatttaaagtatttatcatttttataacgaattttattcgcaaatatatgtggatatattttttattgttaccccagtactataaccctcaatttcctatcaattacaccatgtaaaacattgttcaaaaaagtcaaaattcattaaaggtttcgtaaatgatttgtggaggaatagaagaaaactctgtcgtgttcttattctgcgtgtgataataatgccttgttgaaatctcaccaaaccgaccaatcttcaatatgtttgctcgtaaaacatggccctagcagctaataataattcattgcttcacataatgattatcaatctatacttatatctccctatatttattagtataacactcctttattaaagagtcatggaaagaataagaaattgactcatcataaggaagtatgaactatatatcttcaatcaaggaatgatgaggttggatgaacggatgccaataacaattactgacattgcaggttgaaatttactaaacatataacctttgtaaaataagaagataacctggtaaaaagtaatgtgggtttaacaagagtcttgctatcaatatgcttaatacattatttaaaaaactaaaaaatatttattataaaattataaacaacacaatttatacattctaataaaaactaatatcttaataatactgataactataaatatatatcaaaagtcattagtataagcgatgcaatacttatattatttaattaaagacaagggattaatattttgagcatagaattatgactcaaagcaacactttaaaaatgggcaacttgtagaaaaaagagtcgttggatgtaaaaatagaaaacccaaatatacttcatagttataaaaaagaaactataaaaatgtaaataataatactactttttagaagatgtatttttttttcgttttttttttctttctattttcacctttaatataataataaaaaatatcattataattttactatttttttattttcaaaactttatataggaaatagtaaaagtaacattttattattttctattttatttttatataaactttctaaaattggaaataaagtgtcacccaaaaaaattagaaataaagtaaaacaatgatagttttgtaattgaaaaagaaaataaaactaaaataattttcttaaactaaacatttcactttaatccttaaaaaaacataaaatatattttttattcttgtaaaattttaaagtttatttttgttcttacaattttttatacattttttattcttataaaattataatatatgctttttttatccgaagttaaatttagacgaatccaaactttaacctacttgacatgaaattcagctttcatcgtttatgattttaggattttggctcataatcccgattttcattctaagcatatataaaagctagtttttagaatcaatcctcgagcatagaatgtgatcgatttataaatgattaaaaaacattcatatatagtcacgtcattttctccaaagctcaacccacgctagaaaaacaatttattaaaattttgaactcaggctcttgaaacgtgaattatttttaggccatcttgataatctttgtcctaatctttaaaagggatagactgtgactttggggcataatcttataaggaatgatgatgttcatccttgagttaatttattgatgtcctacatatataactcctcataatgtacaacaaaatatacattaacatacccaaacttctcccctgagaacccaaaatcatgataagtgtccaatctcgtaaaagaaacaaaaagcttatcaattatcattcgacaacaacctagaactaggtcataccctatgcctttgcttttaaaaatgactagaagtagaagggcaatgtgctgtacataggtaaagggcaaggctcctggtgccatggaggtagttagtgagaaccttttagtcttcatgaaaatgaaggaagatgttgggagcttggtggaggtaaagtagcactatggaagaaggacaaagagaaatatataaaaaaaataaagttcaagttttcaaaatcaaatcaagttaattattttttaaaagatcaatttggatctttatttgacattttaaaaaacattttaggatttaaaaaaataattttttttctatattactacttttagtgtttattattaaataataagttagttgatgaaataatatcaacttcaatgatttaccacattattaaggagttttgattatgtatatttgtttagaaaattatttttgatccctcatctcatcattcaaaataattgatgaggaattaaaaatattttataaaaaaataattacaagactcttatcaaactccttaatgatgtcataaattattagttatcatcatctttattatattaccaattaacattgttatttgataataggattaaaagtgataataagaagaaaaaaaatcaattaatcaatcaaaattttgattttgattagagagtaaaaaaaagtaataaaaaattaaatccaaaaaatcatgtagagttctttttttgctaaagaaaaaataaatacactattttttgtgtttactatcttattaatctttatttttttttggtaaaaaatgatgtagtattatctcaagaagttaaatattccgtaaatagttatatatatgtcaaataaataaagatctgttaatgaaggtactaatgtatcttatcttatcttttatataaaaataaacaattttataattatgaagatctgatgtagaaataaaactttaaaaataagattgagtatatgtttgaaaatcaagtaagaaaatgtgacagagtacttttgaaaaacaataaaaacccttacttttgtttttattcattgaattgcacgtgaatgtgcactattatcattttaattacaaaacaaatatgtagatttaatattttgaaagtgtactgtagaacacattgccaagcatctcagccatacgttttcacgttccaactgaaaatctcgtccgtccaaatctgcctcgatatcttcgaacctctaaaaagctttcattatgtcgtgtcgtcagattcagcttcgaaaaacagatcaatgttgcatatggttattaaattaccataatgttcctgttttcatctcgctttactcgggggaacagcgaaagaaggtaagggtagaaatggaaacttaaaaatcatgaaaaaacagtgagcccaattaaccttttctctgtctcgttggtctccgttaaaagaaaaatcagatataaaaaagaaaatagctctgaatttactcgcgtttggagagcgtgtgagcacttgcgttcaagctaaaagaacaattttataatgagtagtatatggtaattttctttttgttgtgatttaattttataactgtatcagaaattaataatattaatcattaaaattcgtctgtaacaaagaattaggcatttattttaggcccattaataaaaaaagttattgattatatatatatatatattttgacggatatacattatgacttaaattcataagtcttaattaatcttgaattaaattatcataccacgattaataataataataattataattagacagcaactctcacatcctgtctcatataatttgcattgcttctgcattctaatatcaaatagttaacttaaaaatgaagtaatgtattttagttagatgtggaagaagaaattaattttcttatcattatttatttatatatgtctagatattttagtattaattgtttttgttaatgatattttagtggtagtttggcaaaatcctagataaaaatgctacaacaacattctaatacaaattcaataaataaaaaaataagaactttgatccgttgataacttttttttccccaaacgtaattttggtccagtagaacttttgcaaaccaaacatattcttaatatttggagtgtcgttttagttgggcattgaactcgaaatgaagtgtaatgcattgaactcgaaatgaaataggaaatcatattttaatgtattgccgtagtgaaagcacatgggtctagtatgaatggggcccacatgaaaatagtttaatatcctctttctgtggtgtaggaaaagcctttttcagaactgcgctttcaatcataatatatttaatgattgatgccaagttgcatgaggttgatgtttgtttggctgctcgttgcaattgtaactattttatttcttcattttttcttataaagaaagaagcccaaacacgtcacctccatggacaacagaggactttgacgtttcaaaaatagacaggtcattaaattattaaaaatacttaaataacaaaaaagatgttttatatattttattttattttagttatttcatttatattttttagttttagtactttgaaatttaaatatttaaaattattaacttcagatcctattgttaaacaataatattaattaataatgtaacaatgatattactttttattaacaatctattaatcttttatgctattaaaaggtctaacaaggtgattatataatatcttttataaattatatttcttttaatatctcatcaactcatccgatagtatcaactatttttaatatataagaattttgaaacataatttttttttaaaaataatacaattgattatcttgttagactcacaattatgtgataatcaattaattattattgtcattaatacaacaccaattaatattattatttaacaatacagattaaaattttaaaaaatatttaaaaagactaaaattatgataattttttttaaagattaaattcaagcccctttaatcggttatttgttaaggcatcatctaccccagtttgtaacatgactgattcactgatttttcaatcaaattctgcaaatagatctaagttcattaatcattgttgcttgcccaggaacaacattcttagaaaatatacttatattgatatccttgatatttaaattcaaaagaaataatatctgtgttaggaacaatgtacagaagcatcttgtagttcatattatcttacattaattttatacaagtgataacaatatattaaagacctcttaaaatagaataaaaataaatgaaaattacaataaattaataattgtaatataataaaatcatatgaagggtattattattattcaagttttagtgcagtacgtgcttttgaaagcatgttgcaaataatcatcgatccttgtcatccatggcggtgctctcgtgacggcaccactgtcttacaagatagaaaatggagaggaccacactccaacctcgtgctttctttatacgtttatttactcgtttttatttttattttttattttacagcaaaaacatttgttagatatgtaacaagggttgttttttatatatatacatattatatttgtagaaattaaaccctgattatatcaaagaatttagaatatttacatatttgattattcaatttgagttggagtcttttcataagaatacttttgtattaagtgtgagtattcatttttttaaaattatatttgtaaagttagtttttatgaaaagttatacatttgcagggtacacgaatataaaataagcatacgcggttaattaaaattttcggggaaaactattgggaaccccacgtattattcttattttttgattgagagcatctttaggttataattttttttttttcatatcacactatattttatgagaaacaatcttatttaagttaaataaaatatgattattatatacaaataaaatatttaatataattacatattataaaatatataatttcatatttaagatcacatatcaaacaaaataaatatcacactaatttattcagatggtcagtgataaaatcaatttcttttgatgcataaaaataattgaaatagactttatttaattttttattgagtgaaatttcgaaagtaagtaacatttaagaaaaaaaagtagtgtagaggaatgcggaaaaagtagtgtagaggaaagaaaaaaattgaaattgaaattgaaattagaagaaagtgaaagaaaaagtaattttgaatttttatttttagaaatcatttttttcttttttattttcttttaaaccaaacaaaagaaaatatatgattattcgtattttttattttcttttttccttgccaaatataccacaagagtttgaggaataaaaactttttaagcataaaataaataataatattttttgtttataattttagagtacattttttaaaaaataaataaataataaaatgtgatatattatattacatgtaaaattaattttccatattcaatgcggttaggttggtaagaaaataaatgataaacaggacatgacgcactagacatagttcatttgtcaaatccgtaggggttgccaagataaggctcgaagggtcaacgtctatatgataattaatagcctttctagttgactaaaattaggaagctaatgttaggacttagaggttatttggacacaaattatatatatttttgagaatttttttttattaaaaatatagaatttcaaaagtacttttgattttgtatccaaataatatcttagtatataattataactttggttcaatggttctaattaacacgacacatgttgagaataaatttatattttaaacttgacataaatccaaaataagagtgagaataaaaatgtaactgagaagtctatgagataattgaataatgaaattacaactaaatgataacacaaacctcttacccctccctcaagcaataggaacaatatgtttggaccaacttacgtatttttagaagaaaaaaaatattttttaacttaaaattaatttgtgtataaaataatttataaaagttctcttgtattaaaagatggttttaacttatgcgttaattaattttaatttctaaaaaagtccatatctttttttttttttccatatttccttagcctaaaagtacttatatgcataagcttactgagcaaacagttcataagatggtaatttctattgataattgttcgtattatttttgttgcatttttgttgtacccattttatttttcatattttctgtcattgatcacatagatatgtataattcatgtcctatttatcctataaaatgcttagtcaactatgtccacataatgttgctcactggtttacaagtattgtaagatactctcaaagaactgcatttgaagaagcaaggaatacggtttggaacaaatggaatttcaatctgctaatgtcattttcagttaagcaaagtgcttttcgtaaagaagtggagcttttgccccacacaaatttgaacccacacaacatgtgaaagatttaatttgccctgggtagctttaactgagcaaaaccttatggaccacggttcaaagtacgttatggtaacccattccaattactaaattaacaatggtattgattattttaatgcaacaatatgtggtggaaaaagaacaatgatattgatatatttacaatgtattttcttttttaccttttacacaacaaaataataagatttttttttttatctcttatcaaataacttaaaaaatcatctcattttttatttattcaatcttttcacttttccctctactttttcttccaaaaccaatgtaccctaatgggacctaggatgatcacgaatatcattttctaccaaattactaagccctaaggctgggtatggtagcgtggaagagaaaaaatggaagaaaattaaaaacaatatttgaattaaaatagaaaaaagaggtgcaaaacccacactattttttaaaaatagtctcatgaatgataaattcattaacacaaccaaatcaaggttaaaccaatacaggttgagtctagtgtaaagaattaatctcttcttataacatggtgaaccaatgttagaatccctattataggaggtattcacatttaatttaatgttggaccaaatttcaaaaagtattaagcagattacatgtgggaaaaaaaaccatggccaagtacgggggatacatgcatgatgcaaggtgagtaagattggtaaatggcctggccaaagtgaaaatgttattattatctcctaaatacaaaatgtggccttttgggtatacctttggccacattaggagaaagaaagggaaagaacataaacaaatgaaagcaaaagaggtcatcatctattattttcacataaccaaactcaatggcctcatgctaataccgtcctgccattcatgcctttagtcacctcattcattgaaagcagattctcacaaaggaaagtgagaaccgtccaaggcatcttctagatatatggaaggccacataaacgtaagtgtcattgttttatttatttattttgcaacttctgcaaaatttccctccctttgaaaagtagtataatgataaacacctttccattaaggaattctagtaagcaccttttgtctggaagaagccacctcctaggagtgtgggattcagttgttattaagaacaaagatatgtataaagctttatacatttggcagctttttattgtctcaaagttatagatttttgtcccaaaaaaaaatacaatttttaatttaaaataaagtggagttggcacaaaataaagcttcgttagaaaattatcttcaaaattaattgtcacaatcacattataacttaaatgcatacttcaagaattttgatgatccttgatatatatgaccttttcgaccgagttattataggttaaattgctttcgagttttgtaaaagtcttcttcctttgatatattaagaattaattactaccactatattaaacgataatcgatatttagctctcaactagctttatgaaaatccttcatgacttcattgttcaagaattttaatgaaccttttaccaacatatgaaattagagggaaataacgtattttttctcctttaattaaataatattagaagcatcgatcccttgatttatgaatctactaaggatgatctaccatgataatgaaaccaaacttagagtctaattccataagcttaagggaatatgtgtcatgttgagaaggatatgcacaggggtggagggaggggggacctgtacggcccatggcccccaaaaaatttcaaatgtatttgattaccatgaattttttttatgatcctcctaaaatttataataaaattatagaaaatatataagtatgaagttaatgtgatctaatgtcttcaagagagataaaaaaattatgtattaatgaaatgttgataatgttgagatacttacgtataattatctaaaattaatgattttatctatctagtttttttctcatatagtattacctttgtacttaatgtagtcatatatttttttttttatttataaaaaatattcggcatatatagatataatattaatttctttaaaatttttgcatgcaaaaatttgatatttttataaaaatataattttttccttggtccccggaatcaaatttctggctccacccctggatatatgtatatgcctttgattagttataccaagaaaaattataaacatttacacacttggtcttctatttcattccacttctacttcatttctttcatatcttttcttttccatcatgtcacttaaatatcacattcattattttgtttctataccttttttctttctatatctcttcaatgagatagaaattgatcactactcttaaaatttataataaaattatagaaaatatataagtatgatagttaatgtgatctaaagttttcaagagagataaaaaaaattataagtattaatgaaatgttgataatgttaagatacttacatataattatataaaattaattattttatctatctatttttttctcatttagtattacctttgtcatatatattttttatttataaattttttcgatatatatataatattaatttatttaatattttttgcatgcaaaaatttgatatttttataaaaatataatttttttcttggtccccggaatcaaatttctggctccacccctggatatatgtatatgcctttgattagttataccaagaaaaattataaacatttactcacttggtcttctatttcattccacttctacttcatttctttcatatcttttcttttccatcatgttacttaaatatcacattcattattttgtttctataccttttttcttcctatctctcttcaatgagatagaaattgatcactactctaatacaaatgcgtgtctatatattgaaaagtattttttaaaactatatattgacatgttaaatatgagagtcaacaaggcaacacgacaatttaaacgttaatggatgctagtaaattaacaagtaaaataaggaacaagaaaatataattgcaattatatttccattctctttttacatcttagaaagatatttctctgaagtgattagaacttttgaatattaaacccatatggcccaaagactatgcaaacaaaactcaagctaaattaaatcccccaaaacgccaagtgagcatccaaggcatatagcattgaaaagtaaggaaaagaaagccaaaaagtttgtgaggttgaaaatggtgggggtgaagagatgggatacatgggtgtgcgtgtgtttaaaaagttgcgttttttgtcaccaaaccatctttttacccctccatctctttttcccaccttttgtagatgcttgccaaccatatctcctcaaatttatttatttttaaaaattgtgtcaattaatatttatttctcaatatataaaattgatgtagtgattaaagaagaatacaaagagaagagaggagaaaaaaattgtgaattcgaattctcttaaggaatatttttaacaaaactaacaaattaatatttagttataaaaaaatttaatatttgttcgttcttagtctttctcttatctttttcttcttttttctttttttcttagtcagcttagaaacaacgcattcttcgcaacccacacattttgttttatcctataacacacacaaaaagcaagcactgatattaaaatcaaacgtcacataagggtaggtcctccaataacaaaaatgatgtgtaattggtctctccctctcgttatgcacaagtctctttctaagatacatacacatattgagtggagctttggctccacatagctaccctccaatttaggaatttgcttctttttatccaatcttcttctcatatatatgatttcatccttttattattatttatttaattgtttcctttttgtaatgtggaagatcaatctagctatataggtcaacccaccatccaattctattgtctctttcattctattcatttttttcttctcctaatttctcaagggtggatttcttgttatgattcgaaacaagtttccattgttggtcatcaattaacgaaatattgtcctagctacactctagttttgtagatgcatgtaaatttttttcttaaaaaataatgcatgtcatgacaaaatgcatttctataaagttggtttcgaaagaaaccaataaaagacgcgaggatataacagtagttataatgaatttagagaatctgatttttcatgacatgtcatattttccgcatttcttttggggtattacattttatattaataggtcacagtttttaatgttgtaagtttcagtttttttttttttttttataaaactgtttaccaactgttttcaattaaaaaaactacaaatttacatattataaattttaatctcaaataacatgcaaatcgacatctttaaatttctattgaaatattttgaggttttaattataacaatattttcttttgaaaaataacatatataattaataatctattgatgcgcattaataagaaaaacactgtaattttttctcaataaaaattatcatctagcaactgaatttaattagattagatgttcaattgccccataaaaaaaattagatgttcaattgcctggctagttaattgcatgacattttttagtttcctttatcgatagaaatttaaacagtgcacaggcacttctagatatagcaagagaacaaattgcattatacattgatacttatagaattttttatgtttttttttaaagtattttaacaaagaaaagataccaatacttccaaagaaaaaactacattccaagaaactatgtatccaatcccactttcagccaaagttggtgtgttttgaggcaattattgatcataaattatgtgcactggtttcggctgttctttcagtttatatgatacaagatgaatttgttgtatatatataatccaaacaaagcaaattgacaactcccatatgagggtgacccatatgtaacgtcttttggggtgacattttaaggcccttgtccaattggatctttcagtgtatctcagaagtaaggttgacaagtttcaatatcaatatcattgttagggcatgacgtcgtgattatataactaagttttaggtcaaatacggccaagaggtttgacataaataaacatctattacatttcaatgagtttaggttaggacgcggaaaaataaattatgatttaaactttttttttgggtgatcaattatgattttaactttatggaaagttctaattattagttgatttttgtgtgtaatgatggacctaattaagtgtcgtgcaaattggagatttactatcataaccaccaaattatgaatgaaggtggggtcaattttaacaattgggaagcaatcaaagtttaaaaacacatgcataattttttttaacgctatccataagttagaatagtttttaactcattaggtgattattgaatattatgtgtcttatgaagataaatgcaacactgaaggttttttttggtttataaccccacaacccccctgcccccacacatatacatatatgtgtttaaaatagttgcatatttaaaatagttgtatttcatcagagtatttaaaatagttgtatattcaaaacttaaactctagatcattaattaaagaacaatccctcactaattgatcacaagtttaggtaccataaaatttgcctcatgaaaagttttgtaaaagactatgtacacttaaaacattaagcataacttatctttagctaaattgcaattctaaccctcctttaatttctaatatgattttttgtggtataatctccacaatttagaaaattcataattttgattttcctttcaattttacatatgtttatttttattttattttattttatacattttaattgattaaattattttcagatgatacttcaaatgaattcattagatctagagttcaattagaccaagataaaaaaagttatacaaaatttataattaaactaaaattatagattttctaaaatgtaaaaaataaaattacagaaaaatagaatgactgaaatagtagagcataaattataaagtcaaaattacaatttagcctttattaacctagaaagtggtaacattttcccaatattttaatggaatgactgaaatacggttttgtttatttttttagtccaatttgttttgattgttaagattaggaggaaaagtagttttcatcgttatgggaccaccaacctttgcactaaagggccacagttttacaatggatcaaaggttgtttagtctttacgatgttttaaacttgggccatgagtcagttttcgttttaaatgaaaaattagttttataaggaacatgctatatccactccccttctttgctaattcaccccctttttcaatttgttttctaaaaatgtcatctttaaaaaaagcaccccccttctggaaaaatcactcacccccaactaaaggaagggggcatgcatctttattctatcgaaaacatgtaggtttgttgtgtccagattgcctaacaaagccactcaaattacaatattttgctaaatcgtagataatccaataataagaaagtaaaccaaaaaccatgaggatggggtgaatagaaaggatagcaagtgcagcaaaatggcttatgcaatgctacttctcacccacagaaccttcccccatcaagcaataaggttccacatccactacatacataacatgttcaactctctagttagctacttccaaaatgtttacttcattgtgcctttcttgttaggcaatctgtagacaacaaacctacatgctttcgatagaataaagaagaacaccccctttctttaatttacactacactgtttgcatcaattaaagtggatacgaatctgagtacaaaagaaagaggtgggtgattttctggaaactgtcaataggggtgtgtattttttaaaacaaattaaaaagagaagtggataagtaaataagacaagtgtatatagcaactgccttttataataggcctagcattcttttccacatgatcataattgtttatctacaaacaaacgatttgcttgttaagtttagcaataaaaaaaactaaaaaaactacatacctcattgttcagaggctccacattatgcgtaggtaagagagagggatattatacgcagtcttatccttacatatacaaagaggctgtttccgacttcgaacgcataaccaacaagttaccaagatacaactattgtggcagggctcaccctccttattaagtttagcaatacttcttaaaattgagaaatcccttttccttttgataggaaaagctttgcaataatccaacaatccattagggtcggcatagtattggaggatttagacagtatgcatgagaatgcaagtttgatcgacgttgtattgaaaataaaataaaatagagacaagctttgcattaaagggcctctgctttataatgggccaaagttctcttcctgtcttccacattattagtttggtccattttttaagtttttattttaaaacccaattgattcatttagaagtccttaaactttgatcctttaagaaagtgttaacactgaacacaaactaagaaatcgtcttaactgtttttatcttattttattaattgttaattattagtatttgttagtaaggagaatgaaattcatgagattgttctcttttcattctttttctataataaaaaaaattgtctcatctggtatttaaaaattacaacaattgatcattttcatccaatgatcatcaagttattaacaggtgagcaacgaagacaaaatattaataacttaaatataaaaattacaaatcgaattgtaaataattaaataaaaccaataagtaatagcttataacatcgtggcagagatcttgttgtgcggggctgtgcgtttttttggttaggatcaaatcgtgtattggattgtgtttaggctgtgagcaaccaccatgcatctgcgtggagagtaataatagcttataatatcaatgtatttacccttatttgtcaatttgtcaacaacttgttatagattacaaacattcttaatatatgatatcttttttgctatcaaaaataaattctcagcatggtattgatataaaattgatcaaatgaaagtaacgataaatcttcattaaggaactgtgaacatatataagataagtattttttcctaacacaatttattttatatcaaagatttaattattcaaattttgaaccacttaattagaaaacataaattgttatcacttgtgttaatcgttattggttgcagaatttaaatgttagtaaaagttttgaaattaacctacttagttaacttaaactatgatttgatgtcatggttttgtttacgcgaatgaacaaggtgaggaacttgcggttagggcgttacacagttttcatctttttaaagggcatgattaaagtagtagtttttggtaatgattaaaattggttaacattcttcttcttattaaaaaataaaattggttaacattcattgtgagtttttttctctcttttatatgaaaaatgttagttaattttatattgtattcttaaccaatttgatttatctacaactaggtttatcctttttttttaggcagcaactaagttaatcctaagcacatgaggtctgtagtgtatataatggttaaagatggaccaaatcacattcaatggcattaaactccattcataactaataatgacaaaggcttgataggacagtgattctgtgatttagtatttcttccgtcttaactataattatcatgtcaaaaatagttctaaaataattattattttaattttttatgtaacattaatttttttatttatatttcttatatattaatgataaattataaaatctaaaaataaattaataataatataaggttaattttataaaattataattctttttcatctatttattattatgtttatctgtataaaatatcccttatatatagcagtgcatttttgtccatatattgagagaagcaaataatctggcagatgtgtttgctaaggagggtttacatttaagcaatgatgtttgttattgcaatagtattcattcttttgctgtaaattcccaatatgggaatgctgttcctatctcaaacttgagtaaataaaatgtctaacgactcctttttagcacagacaatgcagaaaaaaaaacaaactaacaacaatagttattttgggacagaggaagtacagtttttgttaggaaatccatttccaggctttgtatgtgaccctgtctttatcatggagaaattgaaaacaatagtaggtattcactactctctagtctttaataaaagacaatttgaacattaatcacacgtaccaataaaaataattaatttagttaattttattattttcttaaaatattattaatgtattaattatatctttattaattattaagttattatgagtaattcaataatgtaaaaatattaaaatctaaaagtattatacaccactttttataaagaaataaaaatatttagaatatttaattagagcaactaacgaaaaaaagattaaatgcttcacaaaaattctaaaatgcgttagaaaaatgatcatcaatttctttaaaactataccttataataaaaacaagagaaaatattaaatttattgtgaatgttaaaataaaaatttaacgacaatgcatatagtgatacagtgtgaacaagttttatattattattcaattaaaaatcattaatatattatttaagataattaatataagagtttaatagtgatgataataaatataattttatatttttgtttaattatatataatgattaatataattttaaaataattttattaaagtcattaaatttataataaataataataattttaattgaatgataatgaatgtataattttttcttcttattggaattgtaaaaatcaatcaacttttctttttcatacatactttatgattggtatttggatgagagttcgacagagttacactatcacgagagttacactgttagtgaatatatataattgagttttttgagtttcagaaatgtttcctaccttacctaccatagtaccatctctaaagtccaacattttgatatgtcacaacatttttatccatacccaaattacctatgcccccgattttgcttccgtgccaaattcgccaaattctgaataaccaaggttgccaaattctaccatttcttcccaaacttctcatcatcaccaaagtggtggagcaaggaagaagcaagtgctcatggctactacagtggcatcatcaatggtagtagcatccttttgttccttttcaaaccccgccaccccatcctcatcatcatcactctctttcaaaaccaaaaccatcaccagaacaagaccaagaacaaaaaccagaactagaataacgaggttaacatggctgaatcctcaccctcgtggtgctttggttgaggcaacaccacaaccaacaagttcacctccttcaccgagagatggatccatcaaggtgcttgcgcttcctgagaaccgtgctgatgacattcaagctgaggccagagccctggctcgtgctgccaatgcaacttcgtacacccctcagcttgtggcctccaaatatggctcccaacccatcaaggtttttcacctctttctacttctgttcctcccaaagattgagtctttttcgtgatattttttgtgggtgtgatttttttggtcttgggtcagaaaccacgggtgtcctccaactcagttactgtgttagagattaatctcgcttgcggtgcgtgactgatgctggcactgaggaattttgcacatggtgggggaatcaaacacaggttctcccccgaaatagatcctccccacgtgtgggaaagcaccggggccttacaccagtgcgccaaccctttgggtttttgtgaattgatttgacctttttttttgtaggtggtggggagggcccttcaggttctgggtgcggtgggtttgtttgggttgaagctgttgttggaccagaaaagtggagtgcttgatcagaataaaaggattcgtgctcttgagcttagggacacattcactcggctgggaccaacttttgtcaaattgggtcagggattgtctactaggcctgatatatgcccagctgagtatctggaggagctctctgaacttcaggtattgaatttttgtacccttttagctcttaatttgattggtgtagtgtagcttgttagatttttctagtgaagcatgttctaggggttaaataacttggcattgtgtgggaattttgattggttcagtgattatgtacatatgcagcacaagaagctattgactatttcatttgactatattggtctttgaagatttggtcttaaattgaattgactgatatcgtgtgatccatgtagctgatctcacctagacctagttggataaggcttttgttgtatatgctcttgtattgtcaatggacaatgttgatgatatccaatgaaaatttattcgcttatatagttttttttattgacaaatgttagttgttagaatgtagttttgttaacagagaggatcaaactcgcgacctttccctccttcccttctcccttaaccatccaacccaccttatatcttctattcagttatatagtggagtcattagtagcagtgagttgtgtggattttatatatttgtttgtactgtgaagatgtttatgaatgaactggttacttaggtttccttgattatttctgtgctttaccaggatgggttgccaacatttcctgatgaggaggcctttgcatgcattgagagggaactaggactatctattgactctattttctctactatatctccaacggctgtagcagcagccagtttgggtcaagtttataaaggccggttgaagtactctgggaaacttgttgctgttaaggttcaacgccctgatattgaagaagctataggaatggacttctacctaattagaggtttagggtctctcataaataaatatgtggactttatcaccagtgatgttgttgctcttattgatgaatttgcacgtagagtctttcaagagctcaactatgtgaaggttagttcttctgccaatatgaaaatttgtattttaattgaagccaggcatgcatcatgattcatctattagcaattttctgcatttgttgcaatccttgatgatgctatagttgtggtcatggttactccgaaaacctcaacactgaagccaaatccgctgtcatggactgttttttaaaaccttgtttatgaaaataaaaaaaacaaaaataaacattgaaccctttgtagttttgccaaattttaggcaaaaggaaagcatataaccatgttatccttttcatttgtaattcaaatcttccctagggtggtatatgtgtcatatggatatagatacatgtttgtaaattatgcaagatatttgttggaattgaatgttaattttgacaggttcctgcaggagggacaaaatgcaaggaggttcagaaaattgtatgctgacaaggaagatatctttgttcctgatgttttctgggactatacaagtgctaaagtactaacaatggagtgggttgatggagtcaaactaaatgagcaacaagcaattgagagacaaggattaaaagtcttggatctggtaaacgcaggcatacagtgcagtctcagacagttactcgagtatggatattttcatgcagaccctcatcctgggaatcttttggcaacatctgaaggaaagcttgcttttcttgattttggcatgatgagtgagactccagaagaagcaagatatgccataattggtcatgttgttcacttggttaaccgagactatgaggccatggcttgtgactactatgatcttaattttttatcaagggatgttgatgtatctccaattgtgccagcacttcgaaacttttttgatgatgcacttaattatactgtgagtgagctcaacttcaagacactagtggatggtctgggaaatgttttgtatcagtatccatttaatggtgagataaactatgcttttcagtgacttatcatttcctatcatttcttttcctatattagactgatttataaatatttactgcttatgcccaaatcctaactttcatgcagactctgataggttgacttttgtttttctgttcttttccccttctgttgacagttccagcatactatgcattaatatttaggtctctcactgttttagaaggtttagcattgtatgctgatccaattttaaggtacttgctgcatcatacccatattttgctaaaaggctcctaacagatccaaatccatatctaagagatgctcttatcgagttgcttttcaaggatgggaagttcaggtttgaaatcggctactatcttaaatctattgttgtttgaacttgatgctgtagaataatttatatgaagtgcagttgaatattcattaatctggtccagtgcagatggaatagacttgaaaacctgctggaccaggggaaaaaggatagagatttctctactaaagaggctttacaacctgtcctaaaggtattattgagtccagatggtgaagagctcaggaatctagttataaaagaggctgctcgcgtatctgaagcttttacccttggcacaatgtctgaaacataccggtatattcctgacttcgttaggacccttgtcttcaatggcaatgcaaatggaccctttatgatgtcagaaactgaaatgcaaagcatgatagagcttagagatcaagtgattagaatatggggacttcttcgatcctccaacgattttgatccagctattttgctaccaatactacaggtgtttaaattattttaatagagcattttgtaaatatcattgcatactaaattgaaagttaatttgtggaacatttcaatcttggagcatctaaaacatgttgtatgatggagtaatggatcaaggaatttgatagttgaaaaggtgtgtccatgcaaccaaaatatagcaaactattactatagccctcaatcaacattaaaaaaaagatgatcttgaaaagtgaattgtatattagtttagatatgggacaaggttaactgttgaaatttgcttatttacattaataaatttctcttaaaagtatttagtggaattgaattgaaactttttcagctttttttttttttttttgcaattgtaattttacaaaaagcaatatttaatatgaacaggtccttgagaaacctgaggcacgccaacttggggggcgtgttgtgggtgggatcactcaacgacttgcagcacgctttcttcagcaagtactccgagttccaacaacagcttcagaataattttgtggcactgtaaatgctagaaaaggcatgcatcttatatattttccctatgaagtttgaattacttttgtggtgctcaaggtttattaagttctaattactggtgtcatccatagtgtgctgtggcattatagtccattcttattgattgaccagatgggccagtttgtttaaactttaaataagcatttttttttaaaagttcttatttaataagcatataggatttgcttatcaaaataagcagatttttttttttttttaagtaaaaacagtttagaaaaacagactaaaaaaaatataaagctgtttattttgtacttttttttcaacaaataagtttaaacaaactagctctatgtattaacgacgatattctgtttttgctaaagctaatgtttttggtttctttctttatttctgtcaggctattgtggacagggaagataggagtcacatagaagtgagatattgattcttgcgaaaattatttgattttcttttgtgtttcttattctccaattttgtcaaaaatttgtatatatgatgtgctcatcattattgatgctggatatgaagatcagcatcaacattcaagagatcacaatattataaaaaacaattggtatatcattgctcttacaataacatgttgctgtttatcttttgatatggcacactcatttctcttacatgtattgtacctggaatcgttttagtaacttgcttttaagtgttttggaggggttatacagctgaatatgaattttaatattgtgatcattgctaaaacgaagggagtgtgccatacatgagagtgaaaggaagataaatgaaaggagaggttatttatgtgtttcgggctcctattggatgtggtgggtatttgttttgtagttgacacaattttcaaggcacatctacataaaaacatgtgttttgttggattggatcaaacttcagtttaagcatctcaaacataaaatcaaacacaccggtagattgatttgtcttagtcatggtagagatactcatttaatgtctatagcaatatacatgtcgacataatacatctcatcaatgtcgatcgattggtcaccatatcaggttgtagttttggagagttgagtctttctcataacccacccgttcaggaagaactatatatgtgtatacacgttcaataagtggatatggtataaactgattaataaaaatagatttagttgggggacaaaatgagaaagcatcatgtgttagtcttaactatgaactagttattcatgagacaaaattgggcatttttgctaatttcattcctcgtgtctcaacaactctaattaatataggaaaatgatagtgtactctccaaattttgaccagcaaaagtgagaaaagaccacataagcgtgtttatggatgattagtgttgactaaattaatttttaataaaatttattttataaatttttattttagttaaaactaattttatagtgatattatttatgttttgaatgtttttattttaaaaacaagttcatggaaaaatttaatataaaattttgttgaacataacaattatctaaaattattcaacatcaacatctttcatccaagttaattggggtcgatggtaaatgaacctattgataaatagaaaatgagacaaaaagagaaagggagagggaaagataaaagtgaaaataagacaaaaaagagaaaaaggggtgaaaggaagaagggataaaagtagaggaaaaaaaactaaaacaagggaatgactgagacatagaactactaatgggtttaaccctccaccaagtttatagcttttctccactccgtcctaagacataccatccaccaatctatattccactttatggaaacctaagactctatcttcctggcataaaccaaattgatttatggaaaccttggtctccctccttaggcgatgttcgataactctctcccacaacttcatagaatgactcatgagcttgatacctctatagtttgaacaatttgggaaatcaaggaggataaatattagggagatttacacttgagtaaccatataagtgaactaaacaccacactttaacccaaaaccttaaggctcatgtttatgagtgtaacaccccgtatgcatccgatgtattaacatattacttaatcagataagcgcataattactttaattaaaaagctgcggaagctatttcaaaaccgtatttcttgattcattatgtatggttcgcgttgagtacacatcataactatatttagcctcattgatccacaacaacaaaataaaaccatggcagatgcataaacaatatctctacagatatattaggaggtaacaaaggtgtatataaacatcagctgacactcacagtgtctatacaaaagaataggcatctcggtgctctgatctcaaagatcacttcctcacacgagagcatacaatcatatacagtccatgtccaaaacataaacataaacacaatatgtgcacacacacatatcttccctctacaggggtacaaggtataacaacatatacaaaacgagcctcccagctcacaagtagctgcacagctgtccctactggggtcttctgtcctgggaaccatcacctctggtatcagagtcacctgcaaaacataatccccacacggcgtgagatacacatctcagtaagctcagggtccttggaggcatctcctccaccttggctcactttccatgacacacgtcatcaaggcatcacaatcactaggcctctcggccctcataacaatatacagccaatcatctaactctaatgtatatctgcggaactacgccgccacgatgcatcatcatcagcatcaggcatctcagtcctcagtgtgagaccgaaactcacattcgtgccatcccatcgggagctatcccttacgcatggacgcacgtatatggcacatccgagaataggcttcaactgcaacgggaccacctatctcttggtcttaagggatcatcatcacccatgacgtgagcaaaccaaactaggaggtgcgctcttctcctagggaggtccatatctatctaactggccagaagatctaatcacaggtatccatacacacaaagcatagaatcatgcatacatatcattatgagcaagtaacaaccatttcaatgcatgcatcatgaatgcaaccatcactccctcgaagtatggtggaacacatcagtgggaaacatccccaaggaaccaagaacttacctggcaaagtcgtgctctgcggttcagtccctgaacgatagtctacgccactgacaccctcgatgtcacgccctatacaaggcatataagctcaaatcaaaatccaaatcaaccatacaaggcacacaacaacggtcctcaatcgttacagatgaaagaaacatccttcctttccaaataaacccttaagtcctctatcttaaggttattaaagctaaaacaattcactagacaacttatagaccctctgcggtctatctcggcctaaccaaggcactagagtctccacaagactcggtacaagccaaaataaagaactcaaagctctatatataggccaaatactcaagaattcacaatgtggtttgaacggtttctttcacgcaatgtagccattcatatagcctctcaggcacatctagagcaaatatcaaggctcatgcatggtctataatcattaattaaccaacaaaataccaacacatgcatctctcagagccaataatcaaagttcatgaaactaacatttgaaagctaatccttcatcacaacaactccctaaacatacatttctaaaggatccaaggctaatttcaactctagctcaaaaaggtcactatttatcccaaaatcaatctcacaaattaaacggtaaaactcgagtttcttacctctaagatgacaaggaaggccaaagaactactcccccaagcttgggtgtctgtgaatcgcctcatttcctcgccgaactcgagtttttcgaagttccttagagaaagggatttctccgtttgaagcattttaggaggaaagtgatgaaggattctagctcacaagagggttccctacaagtttcatatttgtaggaaggtgttttgatgaataaacgaaggtttaagaagcttgggttctcagcaatggaggtgcacggccagaggaagaagaagcaaaggactttgggccaaaactcataaaatgacccttttatagtgggtctgcccgtgctcccgcgctggtggcgccacaatggcgctaccggcgccagttcccagagcatatggcgctaccggcgccacattccagagaaaaatggcttcttgaagcaattctgatgctaccagcttcagttcccagtgcatatggcgctggtggcgccactctggcgccagattctagtgaaaaatggcctgcagctacagtgccacgccatcagcgccatataaatctacagtgccacgccatcagtgccactcccacgctactagcttgagattttttttaggaccaagggttattataatgagtcttctcctcacttatatggtgttcaacttgtctatttctatccgatatgagactttaaatcacacttgtactccaacctaatcctattaaaaagattggtcaactattttattgttagatctattaattaatttagaattggaatatatcgaattgcacaagggtcaaaatctgagtagtcaagatgaacaatataatctactacaaatgcacgaaaaatcaatttaaatagaacctgtatgataagtatgaatcagaaacagatgcaaagagatgaaaggatccgaccctaacaatgttgtctccttaagacaatttgttccctccaattgatgccaaaggttgatgaacaattgtctcccaggatagaacggatcaacgtctgaagattgatagcacttcaaatcaacagcccaaacgaacaaagctaatgcttgaggaaccactcagaaagagtgaagagttatgtgatatgaaaatgcaccggtatctaagcgaaaatatcagaaaagattaactatcaaaactctatcaatttttctacttcctattttttgattgtctctgtgtctatttatagacaacaaacaaccatgttgaagagttgtcggtaaaccgtcatgacttttggcgatgaaccatcgtaaccgttggttattggagcggttaggagtatttattatttttctaacctttaccaggagcggttgagagtagttattatttttctaacctttttccaactgcctcttattcataacccatggagtttaaacaaaaaactccaacatttattgctacatctcctaagtctctccacactttctgaaactttattatttttcatcctctttaaaacctcattaacttcatacgtattaattctgcgtacaaatcttctattcagatcataaaaatgtcctccaaatattattaaatattaaaccaaacatgcaaatatgcatcttaaatcactttagctaatatcttaacataattttagtgaatttaacatgaaatcaaacaagttataatatgtttggattagatttatactatgaaataattaattaaattttcatgataaaagaaaaaataaatttttttatggcatcattttgtgttattcaagcactattaagcatcactcccaccttttttccatcagttgagatttggcggttacacatgtgtccatgagattgtgccacgtgtactaactggtcggtactggcggttggaacactcaactgtgcccgttgattgaggaacactgaggccaagttaccatgtatctttgtctgctgcccttaccttacaccttagttcttgtaggtcccactgtttctttcaatacatgtggcttctggctcctatttaattgctaaacagtttttactgtcagtgagagatcacttcgtggcatttgattcattcaaattcttatttgaagctttgtaataaaaacacaattttttttttgtttaaatacggtaatacactttcactaatttgatagagttattgttatgtgatgtgaaagggttaatctaggaatagaaggatttaatttaattaattgaataagatacatgaatttttataaatctttgatacttgataaaaaatgaattaatctaattatagacggtttcttttatcaaagaaacaaaaaagaaaaagaaataaaagggatcaatttttcacatcatatcaaagtgagaatttcatttctaaggaaatataattcaaagtaaaaaatttcatatgaaaattggcagggaaattgatatgtaatactaaaatttctaacagtgaaaagttaaaaaaccgtagctgttcatataagaattatcaaatgaatttaaataatttcacatatattttattatatatgtgtaattttttatttgataattataatttttttgtttcttaagtatttttttttttacattacgtgagttttattttttgcatatgtcatgaatttagttatttattcccacttcttgtaatggcatatattatggctatgattttgacagattgactcgtgtaaccccatactttttaatgtgtttggccggatattataacctgttgaccatttcaatttgtcttatttatttacccatcatcataaatatggtcaagatgagttgatatgttagaagattactatttttttttaaactgagacattaacaatataaaatataggaaattatagagttcatgtttagatttagcactcttcttgatttctactcctttggacctaccctatgacacgtgttgctgcattaggttatgattgcagaaaaaggtatccaatgttttaactctggcaagatactagtcaataagtaataaattacaagattaatctgtgacattagtcaagtgatcataggttaaattcgcacggttaatttgttaaaattaaatttatctatattagatttcggacctcacaaaatctaacacacaagactttaaaaacaataataaactcaaaataactcttgattctccactcttagctcctaggcttgttcttttgaatctcaactatatacaccttagctcgatgctcaaattcactaaattagcaatgtgtcctagttggcaaagcaaagaaccctaatttcttaggcgcactcattaattaagcactcgtgcattacacttggattctcaaagtgcacataacctacacattttcattcctactgcttatgcaaattatgtgttccaaatctcagttcaactcaaaatctctttttcgagttaaccctaagctagattcaattgtctgatttccacctcacccatataacattaaacacagagaaatgaaattgaaacataaagcacgcgtttaaaacgcaattaaatagtctaaattagaagttcataacattgtatttaatcattacaaaacaaacgaacaaaaataacaaaataacataaggagatcaaagaagaagccaaggaagctctccattaaagttccatatccattcctaaaatgaatctgtactgatcaaaatctccaaaatatcactaccctaactctcttacacactaagattacacatgatttggtgaaagctatatatgcaataaattgcaaagaagagggttcagcttagtagcattctgatttcagttgcttaattatattcatgtattgtattacacaagggttgatcttctgcatatctacttttgtctgccgtagtagttcataaaacagatttgctgtatagctgaatatattttgtcgctaagtcgtattgtttttatgatttatggataaacctatacttttatatatgttgcaattactttgttgccatcctgtccgttttatgctcagaaatacatgctcagggttgcactgagggatctagaaattttttttagtaaaataagaaataatttataatatcattataaaaaatatcactagttattacaaaatagtaatattattgttatggaataatagttgggcctaatatcgaagcccaatttcctttaataccacgtgtgttaacagattcaatgaatgtggactatgacttg
